(19) United States
(12) Patent Application Publication
(10) Pub. No.: US 2025/0011778 A1
(43) Pub. Date: Jan. 9, 2025

(54) APP iRNA Compositions and Methods of Use Thereof for Treating or Preventing Diseases Characterized by Enlarged Endosomes

(71) Applicant: ALNYLAM PHARMACEUTICALS, INC., CAMBRIDGE, MA (US)

(72) Inventors: KIRK BROWN, SWAMPSCOTT, MA (US); LAN THI HOANG DANG, ARLINGTON, MA (US)

(73) Assignee: ALNYLAM PHARMACEUTICALS, INC., CAMBRIDGE, MA (US)

(21) Appl. No.: 18/690,200

(22) PCT Filed: Sep. 9, 2022
(86) PCT No.: PCT/US2022/076159

§ 371 Date: Mar. 7, 2024

Related U.S. Application Data
(60) Provisional application No. 63/345,731, filed on May 25, 2022.
(60) Provisional application No. 63/288,452, filed on Dec. 10, 2021.
(60) Provisional application No. 63/242,798, filed on Sep. 10, 2021.

(51) Int. Cl. C12N 15/113; A61P 25/28; G01N 33/68

(52) U.S. Cl. CPC C12N 15/113; A61P 25/28; G01N 33/6896; C12N 2310/14; G01N 2333/4709; G01N 2800/2821

(57) ABSTRACT

The disclosure relates to use of double stranded ribonucleic acid (dsRNAi) agents and compositions targeting an amyloid precursor protein (APP) gene, including methods of inhibiting expression of an APP gene and methods of treating subjects having a disease or disorder characterized by enlarged endosomes, e.g., Alzheimer's disease (AD) and Down syndrome (DS), particularly occurrences of such neurodegenerative diseases associated with one or more mutations in presenilin 1 (PSEN1), using such dsRNAi agents and compositions.

### CROSS-REFERENCE TO RELATED APPLICATIONS

[0001] The present application is related to and claims priority under 35 U.S.C. § 119(e) to U.S. provisional patent application No. 63/242,798, entitled “APP iRNA Compositions and Methods of Use Thereof for Treating or Preventing Diseases Characterized by Enlarged Endosomes,” filed Sep. 10, 2021; to U.S. provisional patent application No. 63/288,452, entitled “APP iRNA Compositions and Methods of Use Thereof for Treating or Preventing Diseases Characterized by Enlarged Endosomes,” filed Dec. 10, 2021; and to U.S. provisional patent application No. 63/345,731, entitled “APP iRNA Compositions and Methods of Use Thereof for Treating or Preventing Diseases Characterized by Enlarged Endosomes,” filed May 25, 2022. The entire content of the aforementioned patent applications are incorporated herein by this reference.

### FIELD OF THE INVENTION

[0002] The instant disclosure relates generally to methods involving amyloid precursor protein (APP)-targeting RNAi agents.

### SEQUENCE LISTING

[0003] The instant application contains a Sequence Listing which has been filed electronically in eXtensible Markup Language (XML) format and is hereby incorporated by reference in its entirety. Said XML copy, created on Sep. 9, 2022, is named BN00005_0363_ALN_442WO_SL.xml and is 3,663 KB in size.

### BACKGROUND OF THE INVENTION

[0004] The amyloid precursor protein (APP) gene encodes an integral membrane protein expressed in neurons and glia. While the primary function of APP is unknown, secretase-cleaved forms of APP—particularly the Aβ cleavage forms of APP, e.g., Aβ(1-42) (aka Aβ42) and Aβ(1-40) (aka Aβ40) commonly found as the predominant protein in amyloid beta plaques—have long been described as associated with the development and progression of Alzheimer's disease (AD) in affected individuals. Altered APP function has also been described as associated with Down syndrome (DS), among other conditions.

[0005] Current treatment options for APP-associated diseases and disorders are both limited and largely ineffective. Accordingly, there is a need for therapies for subjects suffering from APP-associated diseases and disorders, including a particular need for therapies for subjects suffering from AD and DS disorders characterized by enlarged neuronal cell early endosomes.

### BRIEF SUMMARY OF THE INVENTION

[0006] The present disclosure provides for use of RNAi agent compositions which effect the RNA-induced silencing complex (RISC)-mediated cleavage of RNA transcripts of an amyloid precursor protein (APP) gene, for treatment or prevention of diseases or disorders that are characterized by enlarged endosomes in neuronal cells. The APP gene may be within a cell, e.g., a cell within a subject, such as a human. The present disclosure more specifically provides methods of using the RNAi agent compositions of the disclosure for inhibiting the expression of an APP gene or for treating a subject who would benefit from inhibiting or reducing the expression of an APP gene, e.g., a subject suffering or prone to suffering from an APP-associated neurodegenerative disease or disorder characterized by enlarged neuronal cell endosomes, e.g., Alzheimer's disease (AD) and Down syndrome (DS).

[0007] Accordingly, in one aspect, the instant disclosure provides a method for reducing endosome size in a mammalian cell having enlarged endosomes, the method involving contacting the mammalian cell with an amyloid precursor protein (APP)-targeting double stranded ribonucleic acid inhibitory (dsRNAi) agent in an amount sufficient to reduce endosome size in the mammalian cell, thereby reducing endosome size in the mammalian cell.

[0008] In certain embodiments, the mammalian cell has a mutation that results in enlarged endosomes. In related embodiments, the mutation that results in enlarged endosomes is a presenilin 1 (PSEN1) mutation or an APP mutation, or a combination thereof. Optionally, the PSEN1 mutation encodes for an amino acid substitution in presenilin 1 polypeptide that is A136G, A231T, A246E, A260V, A275V, A285V, A396T, A409T, A426P, A431E, A434C, A79V, C263R, C410Y, C92S, D333G, ΔD40, ΔE9, ΔI167, ΔI83/M84, ΔL166, ΔS169, ΔT440, E120D, E120K, E123K, E184D, E184G, E273A, E280A, E280G, E318G, F105I, F176L, F237I, F386S, FI77L, G183V, G206A, G206S, G209R, G209V, G217R, G266S, G378E, G378V, G384A, G394V, H131R, H163R, H163Y, H214D, I143T, I143V, I168T, I202F, I213L, I229F, I238M, I437V, I439V, InsR352, K155_insFI, K239N, L113Q, L134R, L150P, L153V, L166P, L171P, L173W, L174M, L219F, L226F, L235P, L235R, L235V, L248R, L250S, L262F, L271V, L282R, L282V, L286V, L381V, L392V, L418F, L420R, L424V, L435F, L85P, M139V, M146L, M146V, M233L, M233T, N135D, N405S, P117A, P264L, P267S, P284S, P436S, Q222R, Q223R, R108Q, R269G, R278K, R352C, R358Q, R35Q, R377W, S169P, S170F, S178P, S212Y, S230I, S365A, S390I, T116N, T147I, T245P, T274R, T291P, T354I, T99A, V261F, V272A, V391F, V412I, V82L, V89L, V94M, V96F, V97L, W165G, Y115H, Y154N, Y256S, or a combination thereof, with residue numbering as in SEQ ID NO: 3 (exemplary Hs PSEN1 polypeptide sequence). Optionally, the PSEN1 mutation encodes for an amino acid substitution in presenilin 1 polypeptide that is M146V, L166P, M233L or A246E, or a combination thereof.

[0009] In certain embodiments, the APP mutation encodes for an amino acid substitution in amyloid precursor protein (APP) from among the following: KM670/671NL (Swedish), A673V, D678H (Taiwanese), D678N (Tottori), E682K (Leuven), K687N, F690_V695del, A692G (Flemish), E693del, E693G, E693K, E693Q (Dutch), D694N (Iowa), T714A (Iranian), T714I (Austrian), V715A (German), V715M (French), I716F (Iberian), I716M, I716T, I716V (Florida), V717F (Indiana), V717G, V717I (London), V717L, T719N, T719P, M722K, L723P (Australian), and K724N (Belgian), or a combination thereof, with residue numbering as in SEQ ID NO: 12 (exemplary Hs APP polypeptide sequence). Optionally, the APP mutation encodes for an amino acid substitution in amyloid precursor protein that is KM670/671NL (Swedish), A692G or V717G, or a combination thereof.

[0010] In one embodiment, the mammalian cell is homozygous for the mutation that results in enlarged endosomes.

[0011] In another embodiment, the mammalian cell is a neuronal cell. Optionally, the mammalian cell is a human neuronal cell. Optionally, the mammalian cell is a human induced pluripotent stem cell (iPSC)-derived neuron.

[0012] In certain embodiments, the amount of dsRNAi agent sufficient to reduce endosome size in the mammalian cell is less than 10 nM in the environment of the cell. Optionally, the amount of dsRNAi agent sufficient to reduce endosome size in the mammalian cell is less than 1 nM in the environment of the cell. Optionally, the amount of dsRNAi agent sufficient to reduce endosome size in the mammalian cell is less than 0.1 nM in the environment of the cell.

[0013] In some embodiments, average endosome size in the mammalian cell contacted with the dsRNAi agent is reduced by at least 30%, as compared to a mammalian cell in the absence of the dsRNAi agent. Optionally, average endosome size in the mammalian cell contacted with the dsRNAi agent is reduced by at least 50%, as compared to a mammalian cell in the absence of the dsRNAi agent.

[0014] In embodiments, the amount of dsRNAi agent is sufficient to reduce the average endosome size in a mammalian cell by at least 30%, as compared to a mammalian cell in the absence of the dsRNAi agent. Optionally, the amount of dsRNAi agent sufficient to reduce the average endosome size in a mammalian cell by at least 50%, as compared to a mammalian cell in the absence of the dsRNAi agent. Optionally, endosome size is assayed via immunofluorescent imaging of Rab5.

[0015] In one embodiment, endosome size is determined by detecting the size of Rab5-containing intracellular compartments in the mammalian cell. Optionally, the size of Rab5-containing intracellular compartments is determined via immunofluorescent imaging of Rab5.

[0016] In another embodiment, the level of one or more APP C-terminal fragment (CTF), α-CTF and/or β-CTF, is reduced in the contacted mammalian cell, as compared to an appropriate control mammalian cell.

[0017] In certain embodiments, the amount of dsRNAi agent is sufficient to reduce β-CTF levels in a mammalian cell by at least 30%, as compared to a mammalian cell in the absence of the dsRNAi agent. Optionally, the amount of dsRNAi agent is sufficient to reduce β-CTF levels in a mammalian cell by at least 50%, as compared to a mammalian cell in the absence of the dsRNAi agent.

[0018] In some embodiments, the dsRNAi agent is selected from Tables 2-21.

[0019] In one embodiment, the mammalian cell is within a subject. In a related embodiment, the subject is a human. In an alternative embodiment, the subject is a rhesus monkey, a cynomolgous monkey, a mouse, or a rat.

[0020] In certain embodiments, the human subject suffers from an APP-associated disorder characterized by enlarged neuronal cell endosomes. Optionally, the human subject suffers from Alzheimer's disease (AD) or Down syndrome (DS). In a related embodiment, the APP-associated disorder characterized by enlarged neuronal cell endosomes is AD. Optionally, the APP-associated disorder characterized by enlarged neuronal cell endosomes is early onset familial AD (EOFAD).

[0021] In an embodiment, APP expression is reduced by at least about 30% in the cell administered the APP-targeting dsRNAi agent. Optionally, APP expression is reduced by at least about 50% in the cell administered the APP-targeting dsRNAi agent. Optionally, APP expression is reduced by at least about 80% in the cell administered the APP-targeting dsRNAi agent.

[0022] Another aspect of the instant disclosure provides a method for identifying a subject as having or at risk of developing a disease or disorder characterized by enlarged endosomes in neuronal cells and selecting a treatment for the subject, the method involving: a) obtaining a nucleic acid sample from the subject; b) identifying the subject as having a mutation in presenilin 1 (PSEN1) or amyloid precursor protein (APP) associated with enlargement of endosomes in neuronal cells having the PSEN1 or APP mutation; and c) selecting an amyloid precursor protein (APP)-targeting double stranded ribonucleic acid inhibitory (dsRNAi) agent for administration to the subject in an amount sufficient to reduce APP levels in neuronal cells of the subject, thereby identifying the subject as having or at risk of developing a disease or disorder characterized by enlarged endosomes in neuronal cells and selecting a treatment for the subject.

[0023] In one embodiment, the disease or disorder characterized by enlarged endosomes in neuronal cells is Alzheimer's disease (AD), Down syndrome (DS) or frontotemporal dementia (FTD). Optionally, the AD is early onset familial AD (EOFAD).

[0024] In certain embodiments, the mutation in PSEN1 or APP associated with enlargement of endosomes in neuronal cells having the PSEN1 or APP mutation is a PSEN1 mutation. Optionally, the PSEN1 mutation encodes for one or more amino acid substitution in presenilin 1 polypeptide selected from M146V, L166P and A246E, including combinations thereof.

[0025] In some embodiments, the mutation in PSEN1 or APP associated with enlargement of endosomes in neuronal cells having the PSEN1 or APP mutation is an APP mutation. Optionally, the APP mutation encodes for one or more amino acid substitution in amyloid precursor protein selected from KM670/671NL (Swedish), A673V, D678H (Taiwanese), D678N (Tottori), E682K (Leuven), K687N, F690_V695del, A692G (Flemish), E693del, E693G, E693K, E693Q (Dutch), D694N (Iowa), T714A (Iranian), T714I (Austrian), V715A (German), V715M (French), I716F (Iberian), I716M, I716T, I716V (Florida), V717F (Indiana), V717G, V717I (London), V717L, T719N, T719P, M722K, L723P (Australian), and K724N (Belgian), including combinations thereof. Optionally, the APP mutation encodes for one or more amino acid substitution in amyloid precursor protein selected from of KM670/671NL (Swedish), A692G and V717G, including combinations thereof.

[0026] In one embodiment, the subject is homozygous for the mutation in PSEN1 or APP.

[0027] In a further embodiment, the method also involves administering the selected APP-targeting dsRNAi agent to the subject.

[0028] In a related embodiment, endosome size in neuronal cells of the subject administered the selected APP-targeting dsRNAi agent is reduced, as compared to an appropriate control and/or an untreated subject. Optionally, average endosome size in neuronal cells of the subject administered the selected APP-targeting dsRNAi agent is reduced by at least 30%, as compared to an appropriate control and/or an untreated subject. Optionally, average endosome size in neuronal cells of the subject administered the selected APP-targeting dsRNAi agent is reduced by at least 50%, as compared to an appropriate control and/or an untreated subject.

[0029] In some embodiments, endosome size is determined by detecting the size of Rab5-containing intracellular compartments in the neuronal cells of the subject. Optionally, the size of Rab5-containing intracellular compartments is determined via immunofluorescent imaging of Rab5.

[0030] In an embodiment, synaptic transmission of neuronal cells of the subject administered the selected APP-targeting dsRNAi agent is improved, as compared to an appropriate control and/or an untreated subject.

[0031] In another embodiment, a symptom of AD or DS, such as short-term memory or cognition (or both) is improved in the subject administered the selected APP-targeting dsRNAi agent, as compared to an appropriate control and/or an untreated subject.

[0032] In some embodiments, the dose of the selected APP-targeting dsRNAi agent sufficient to reduce APP levels in neuronal cells of the subject is a dose of about 0.01 mg/kg to about 50 mg/kg. Optionally, the dose of the selected APP-targeting dsRNAi agent sufficient to reduce APP levels in neuronal cells of the subject is a dose of about 2-10 mg/kg.

[0033] In one embodiment, the level of one or more of the APP C-terminal fragment (CTF) polypeptides α-CTF and β-CTF is reduced in the subject administered the selected APP-targeting dsRNAi agent, as compared to an appropriate control and/or an untreated subject.

[0034] In another embodiment, the method further involves administering an additional therapeutic agent to the subject.

[0035] In certain embodiments, the double stranded RNAi agent is administered to the subject intrathecally.

[0036] In some embodiments, APP expression is reduced by at least about 30% in the subject administered the APP-targeting dsRNAi agent. Optionally, APP expression is reduced by at least about 50% in the subject administered the APP-targeting dsRNAi agent. Optionally, APP expression is reduced by at least about 80% in the subject administered the APP-targeting dsRNAi agent.

[0037] Another aspect of the instant disclosure provides a method for identifying a subject as having a disease or disorder characterized by enlarged endosomes in neuronal cells and selecting a treatment for the subject, the method involving: a) obtaining a neuronal cell sample or fluid sample from a neuronal cell environment of the subject; b) identifying the subject as having elevated β-CTF levels in the neuronal cell or neuronal cell-proximate fluid sample as an indicator for enlarged endosomes in neuronal cells of the subject; and c) selecting an amyloid precursor protein (APP)-targeting double stranded ribonucleic acid inhibitory (dsRNAi) agent for administration to the subject in an amount sufficient to reduce β-CTF levels in neuronal cells of the subject, thereby identifying a subject as having a disease or disorder characterized by enlarged endosomes in neuronal cells and selecting a treatment for the subject.

[0038] In certain embodiments, the neuronal cell sample or fluid sample from the neuronal cell environment is obtained from the central nervous system or peripheral nervous system of the subject.

[0039] In some embodiments, the method further involves administering the selected APP-targeting dsRNAi agent to the subject.

[0040] In one embodiment, average endosome size in neuronal cells of the subject administered the selected APP-targeting dsRNAi agent is reduced by at least 30%, as compared to an appropriate control and/or an untreated subject. Optionally, average endosome size in neuronal cells of the subject administered the selected APP-targeting dsRNAi agent is reduced by at least 50%, as compared to an appropriate control and/or an untreated subject.

[0041] In certain embodiments, synaptic transmission of neuronal cells of the subject administered the selected APP-targeting dsRNAi agent is improved, as compared to an appropriate control and/or an untreated subject.

[0042] In one embodiment, a symptom of AD or DS, such as short-term memory and/or cognition is improved in the subject administered the selected APP-targeting dsRNAi agent, as compared to an appropriate control and/or an untreated subject.

[0043] In embodiments, the dose of the selected APP-targeting dsRNAi agent sufficient to reduce β-CTF levels in neuronal cells of the subject is a dose of about 0.01 mg/kg to about 50 mg/kg.

[0044] Optionally, the dose is a dose of about 2-10 mg/kg.

[0045] In some embodiments, the level of one or more of the APP C-terminal fragments (CTF) α-CTF and β-CTF is reduced in the subject administered the selected APP-targeting dsRNAi agent, as compared to an appropriate control and/or an untreated subject.

[0046] In an embodiment, the method further involves administering an additional therapeutic agent to the subject.

[0047] In one embodiment, the double stranded RNAi agent is administered to the subject intrathecally.

[0048] In certain embodiments, APP expression is reduced by at least about 30% in the subject administered the APP-targeting dsRNAi agent. Optionally, APP expression is reduced by at least about 50% in the subject administered the APP-targeting dsRNAi agent. Optionally, APP expression is reduced by at least about 80% in the subject administered the APP-targeting dsRNAi agent.

[0049] In another embodiment, the level of β-CTF is reduced in the subject administered the selected APP-targeting dsRNAi agent, as compared to an appropriate control and/or an untreated subject.

[0050] In a further aspect, the instant disclosure provides a method for reducing inflammation in a subject having or at risk of developing Alzheimer's Disease (AD), the method involving administering to the subject an amyloid precursor protein (APP)-targeting double stranded ribonucleic acid inhibitory (dsRNAi) agent in an amount sufficient to reduce inflammation in the subject. For example, reducing inflammation includes, but is not limited to reducing expression of Iba1 mRNA. Reducing expression of Iba1 mRNA may be within the CNS of a patient in need of such treatment.

### Definitions

[0051] That the present disclosure may be more readily understood, certain terms are first defined. In addition, it should be noted that whenever a value or range of values of a parameter are recited, it is intended that values and ranges intermediate to the recited values are also intended to be part of this disclosure.

[0052] The articles “a” and “an” are used herein to refer to one or to more than one (i.e., to at least one) of the grammatical object of the article. By way of example, “an element” means one element or more than one element, e.g., a plurality of elements.

[0053] The term “including” is used herein to mean, and is used interchangeably with, the phrase “including but not limited to”.

[0054] The term “or” is used herein to mean, and is used interchangeably with, the term “and/or,” unless context clearly indicates otherwise.

[0055] The term “about” is used herein to mean within the typical ranges of tolerances in the art. For example, “about” can be understood as about 2 standard deviations from the mean. In certain embodiments, about means ±10%. In certain embodiments, about means ±5%. When about is present before a series of numbers or a range, it is understood that “about” can modify each of the numbers in the series or range.

[0056] The term “at least” prior to a number or series of numbers is understood to include the number adjacent to the term “at least”, and all subsequent numbers or integers that could logically be included, as clear from context. For example, the number of nucleotides in a nucleic acid molecule must be an integer. For example, “at least 18 nucleotides of a 21 nucleotide nucleic acid molecule” means that 18, 19, 20, or 21 nucleotides have the indicated property. When at least is present before a series of numbers or a range, it is understood that “at least” can modify each of the numbers in the series or range.

[0057] As used herein, “no more than” or “less than” is understood as the value adjacent to the phrase and logical lower values or integers, as logical from context, to zero. For example, a duplex with an overhang of “no more than 2 nucleotides” has a 2, 1, or 0 nucleotide overhang. When “no more than” is present before a series of numbers or a range, it is understood that “no more than” can modify each of the numbers in the series or range. As used herein, ranges include both the upper and lower limit.

[0058] As used herein, methods of detection can include determination that the amount of analyte present is below the level of detection of the method.

[0059] In the event of a conflict between an indicated target site and the nucleotide sequence for a sense or antisense strand, the indicated sequence takes precedence.

[0060] In the event of a conflict between a chemical structure and a chemical name, the chemical structure takes precedence.

[0061] The term “PSEN1” refers to presenilin 1 (PSEN1), also known as PS1, S182, FAD, Alzheimer Disease 3 (ΔD3), Presenilin-1, PS-1, Protein S182, EC 3.4.23-, EC 3.4.23⁵⁰, ACNINV3 and PSNL1, among other names, having an amino acid sequence from any vertebrate or mammalian source, including, but not limited to, human, bovine, chicken, rodent, mouse, rat, porcine, ovine, primate, monkey, and guinea pig, unless specified otherwise. The term also refers to fragments and variants of native PSEN1 that maintain at least one in vivo or in vitro activity of a native PSEN1. The nucleotide and amino acid sequence of a human PSEN1 can be found at, for example, NM_000021.4 (SEQ ID NOs: 1 and 2 (reverse complement)) and NP_000012.1, SEQ ID NO: 3). The nucleotide and amino acid sequence of a human APP may also be found at, for example, NM_007318.3 (SEQ ID NOs: 4 and 5 (reverse complement)) and NP_015557.2 (SEQ ID NO: 6).

[0062] The nucleotide and amino acid sequence of a Cynomolgus monkey PSEN1 can be found at, for example, GenBank Accession No. GI: 148717220 (AB083326.2, SEQ ID NOs: 2940 and 2941 (reverse complement), and BAC20605.1, SEQ ID NO: 2942). The nucleotide and amino acid sequence of a mouse PSEN1 can be found at, for example, GenBank Accession No. GI: 8131957 (AF149111.1, SEQ ID NOs: 2943 and 2944 (reverse complement), and AAF73153.1, SEQ ID NO: 2945). The nucleotide and amino acid sequence of a rat APP can be found at, for example, GenBank Accession No. GI: 1777325 (D82363.1, SEQ ID NOs: 2946 and 2947 (reverse complement), and BAA11564.1, SEQ ID NO: 2948). Additional examples of PSEN1 sequences are readily available using publicly available databases, e.g., GenBank, UniProt, and OMIM.

[0063] The term “PSEN1” as used herein also refers to a particular polypeptide expressed in a cell by naturally occurring DNA sequence variations of the PSEN1 gene, such as a single nucleotide polymorphism in the PSEN1 gene. Numerous SNPs within the PSEN1 gene have been identified and may be found at, for example, NCBI dbSNP (see, e.g., www.ncbi.nlm.nih.gov/snp?LinkName=gene_snp&from_uid=5663, the entire contents of which is incorporated herein by reference as of the date of filing this application). Non-limiting examples of SNPs within the PSEN1 gene may be found at NCBI dbSNP, particularly noting PSEN1 variants that produce the following presenilin-1 polypeptide mutations: A136G, A231T, A246E, A260V, A275V, A285V, A396T, A409T, A426P, A431E, A434C, A79V, C263R, C410Y, C92S, D333G, ΔD40, ΔE9, ΔI167, ΔI83/M84, ΔL166, ΔS169, ΔT440, E120D, E120K, E123K, E184D, E184G, E273A, E280A, E280G, E318G, F105I, F176L, F237I, F386S, FI77L, G183V, G206A, G206S, G209R, G209V, G217R, G266S, G378E, G378V, G384A, G394V, H131R, H163R, H163Y, H214D, I143T, I143V, I168T, I202F, I213L, I229F, I238M, I437V, I439V, InsR352, K155_insFI, K239N, L113Q, L134R, L150P, L153V, L166P, L171P, L173W, L174M, L219F, L226F, L235P, L235R, L235V, L248R, L250S, L262F, L271V, L282R, L282V, L286V, L381V, L392V, L418F, L420R, L424V, L435F, L85P, M139V, M146L, M146V, M233L, M233T, N135D, N405S, P117A, P264L, P267S, P284S, P436S, Q222R, Q223R, R108Q, R269G, R278K, R352C, R358Q, R35Q, R377W, S169P, S170F, S178P, S212Y, S230I, S365A, S390I, T116N, T147I, T245P, T274R, T291P, T354I, T99A, V261F, V272A, V391F, V412I, V82L, V89L, V94M, V96F, V97L, W165G, Y115H, Y154N, Y256S, as well as combinations thereof, with residue numbering as in SEQ ID NO: 3.

[0064] The term “APP” refers to amyloid precursor protein (APP), also known as amyloid beta precursor protein, Alzheimer disease amyloid protein and cerebral vascular amyloid peptide, among other names, having an amino acid sequence from any vertebrate or mammalian source, including, but not limited to, human, bovine, chicken, rodent, mouse, rat, porcine, ovine, primate, monkey, and guinea pig, unless specified otherwise. The term also refers to fragments and variants of native APP that maintain at least one in vivo or in vitro activity of a native APP (including, e.g., the beta-amyloid peptide(1-40), beta-amyloid peptide(1-38) and beta-amyloid peptide(1-42) forms of Aβ peptide, among others), including variants of APP fragments that maintain one or more activities of an APP fragment that are neurotoxic in character (e.g., variant forms of Aβ42 peptide that maintain neurotoxic character are expressly contemplated). The term encompasses full-length unprocessed precursor forms of APP as well as mature forms resulting from post-translational cleavage of the signal peptide. The term also encompasses peptides that derive from APP via further cleavage, including, e.g., Aβ peptides. The nucleotide and amino acid sequence of a human APP can be found at, for example, GenBank Accession No. GI: 228008405 (NM 201414, SEQ ID NOs: 7 and 8 (reverse complement), and NP_958817, SEQ ID NO: 9). The nucleotide and amino acid sequence of a human APP may also be found at, for example, GenBank Accession No. GI: 228008403 (NM_000484.4, SEQ ID NOs: 10 and 11 (reverse complement), and NP_000475, SEQ ID NO: 12); GenBank Accession No. GI: 228008404 (NM 201413.3, SEQ ID NOs: 13 and 14 (reverse complement), and NP_958816, SEQ ID NO: 15); GenBank Accession No. GI: 324021746 (NM_001136016.3, SEQ ID NOs: 16 and 17 (reverse complement), and NP_001129488, SEQ ID NO: 18); GenBank Accession No. GI: 228008402 (NM_001136129.3, SEQ ID NOs: 19 and 20 (reverse complement), and NP_001129601, SEQ ID NO: 21); GenBank Accession No. GI: 228008401 (NM_001136130.3, SEQ ID NOs: 22 and 23 (reverse complement), and NP_001129602, SEQ ID NO: 24); GenBank Accession No. GI: 324021747 (NM_001136131.3, SEQ ID NOs: 25 and 26 (reverse complement), and NP_001129603, SEQ ID NO: 27); GenBank Accession No. GI: 324021737 (NM_001204301.2, SEQ ID NOs: 28 and 29 (reverse complement), and NP_001191230, SEQ ID NO: 30); GenBank Accession No. GI: 324021735 (NM_001204302.2, SEQ ID NOs: 31 and 32 (reverse complement), and NP_001191231, SEQ ID NO: 33); GenBank Accession No. GI: 324021739 (NM_001204303.2, SEQ ID NOs: 34 and 35 (reverse complement), and NP_001191232, SEQ ID NO: 36); and GenBank Accession No. GI: 1370481385 (XM_024452075.1, SEQ ID NOs: 37 and 38 (reverse complement), and XP_024307843, SEQ ID NO: 39).

[0065] The nucleotide and amino acid sequence of a Cynomolgus monkey APP can be found at, for example, GenBank Accession No. GI: 982237868 (XM_005548883.2, SEQ ID NOs: 40 and 41 (reverse complement), and XP_005548940, SEQ ID NO: 42). The nucleotide and amino acid sequence of a mouse APP can be found at, for example, GenBank Accession No. GI: 311893400 (NM_001198823, SEQ ID NOs: 43 and 44 (reverse complement), and NP_001185752, SEQ ID NO: 45). The nucleotide and amino acid sequence of a rat APP can be found at, for example, GenBank Accession No. GI: 402692725 (NM_019288.2, SEQ ID NOs: 46 and 47 (reverse complement), and NP_062161, SEQ ID NO: 48). Additional examples of APP sequences are readily available using publicly available databases, e.g., GenBank, UniProt, and OMIM.

[0066] The term “APP” as used herein also refers to a particular polypeptide expressed in a cell by naturally occurring DNA sequence variations of the APP gene, such as a single nucleotide polymorphism in the APP gene. Numerous SNPs within the APP gene have been identified and may be found at, for example, NCBI dbSNP (see, e.g., www.ncbi.nlm.nih.gov/snp?LinkName=gene_snp&from_uid=351, the entire contents of which is incorporated herein by reference as of the date of filing this application). Non-limiting examples of SNPs within the APP gene may be found at, NCBI dbSNP Accession Nos. rs193922916, rs145564988, rs193922916, rs214484, rs281865161, rs364048, rs466433, rs466448, rs532876832, rs63749810, rs63749964, rs63750064, rs63750066, rs63750151, rs63750264, rs63750363, rs63750399, rs63750445, rs63750579, rs63750643, rs63750671, rs63750734, rs63750847, rs63750851, rs63750868, rs63750921, rs63750973, rs63751039, rs63751122 and rs63751263. Certain exemplary rare APP variants that have been previously described to play a role in development of EOFAD were identified in Hooli et al. (Neurology 78: 1250-57). In addition, various “non-classical” APP variants that harbor an intraexonic junction within sequenced cDNA have recently been identified as associated with the occurrence of somatic gene recombination in the brains of AD patients (PCT/US2018/030520, which is incorporated herein by reference in its entirety). Examples of such “non-classical” APP variants include cAPP-R3/16 (SEQ ID NO: 49), cAPP-R3/16-2 (SEQ ID NO: 50), cAPP-R2/18 (SEQ ID NO: 51), cAPP-R6/18 (SEQ ID NO: 52), cAPP-R3/14 (SEQ ID NO: 53), cAPP-R3/17 (SEQ ID NO: 54), cAPP-R1/11 (SEQ ID NO: 55), cAPP-R1/13 (SEQ ID NO: 56), cAPP-R1/11-2 (SEQ ID NO: 57), cAPP-R1/14 (SEQ ID NO: 58), cAPP-R2/17 (SEQ ID NO: 59), cAPP-R2/16 (SEQ ID NO: 60), cAPP-R6/17 (SEQ ID NO: 61), cAPP-R2/14 (SEQ ID NO: 62), cAPP-R14/17-d8 (SEQ ID NO: 63) and cAPP-D2/18-3 (SEQ ID NO: 64). It is expressly contemplated that RNAi agents of the instant disclosure can be used to target “non-classical” APP variants and/or that RNAi agents optionally specific for such “non-classical” APP variants can be designed and used, optionally in combination with other RNAi agents of the instant disclosure, including those that target native forms of APP. Such “non-classical” APP variants were described as notably absent from an assayed HIV patient population, with prevalence of AD in the HIV patient population significantly diminished as compared to expected levels, which indicated that reverse transcriptase inhibitors and/or other anti-retroviral therapies commonly used to treat HIV patients likely also exerted a therapeutic/preventative role against AD. It is therefore expressly contemplated that the RNAi agents of the instant disclosure can optionally be employed in combination with reverse transcriptase inhibitors and/or other anti-retroviral therapies, for therapeutic and/or preventative purposes.

[0067] The entire contents of each of the foregoing GenBank Accession numbers and the Gene database numbers are incorporated herein by reference as of the date of filing this application.

[0068] As used herein, “target sequence” refers to a contiguous portion of the nucleotide sequence of an mRNA molecule formed during the transcription of an APP gene, including mRNA that is a product of RNA processing of a primary transcription product. In one embodiment, the target portion of the sequence will be at least long enough to serve as a substrate for RNAi-directed cleavage at or near that portion of the nucleotide sequence of an mRNA molecule formed during the transcription of an APP gene. In one embodiment, the target sequence is within the protein coding region of the APP gene. In another embodiment, the target sequence is within the 3′ UTR of the APP gene.

[0069] The target sequence may be from about 9-36 nucleotides in length, e.g., about 15-30 nucleotides in length. For example, the target sequence can be from about 15-30 nucleotides, 15-29, 15-28, 15-27, 15-26, 15-25, 15-24, 15-23, 15-22, 15-21, 15-20, 15-19, 15-18, 15-17, 18-30, 18-29, 18-28, 18-27, 18-26, 18-25, 18-24, 18-23, 18-22, 18-21, 18-20, 19-30, 19-29, 19-28, 19-27, 19-26, 19-25, 19-24, 19-23, 19-22, 19-21, 19-20, 20-30, 20-29, 20-28, 20-27, 20-26, 20-25, 20-24,20-23, 20-22, 20-21, 21-30, 21-29, 21-28, 21-27, 21-26, 21-25, 21-24, 21-23, or 21-22 nucleotides in length. In some embodiments, the target sequence is about 19 to about 30 nucleotides in length. In other embodiments, the target sequence is about 19 to about 25 nucleotides in length. In still other embodiments, the target sequence is about 19 to about 23 nucleotides in length. In some embodiments, the target sequence is about 21 to about 23 nucleotides in length. Ranges and lengths intermediate to the above recited ranges and lengths are also contemplated to be part of the disclosure.

[0070] As used herein, the term “strand comprising a sequence” refers to an oligonucleotide comprising a chain of nucleotides that is described by the sequence referred to using the standard nucleotide nomenclature.

[0071] “G,” “C,” “A,” “T”, and “U” each generally stand for a nucleotide that contains guanine, cytosine, adenine, thymidine, and uracil as a base, respectively in the context of a modified or unmodified nucleotide. However, it will be understood that the term “ribonucleotide” or “nucleotide” can also refer to a modified nucleotide, as further detailed below, or a surrogate replacement moiety (see, e.g., Table 1). The skilled person is well aware that guanine, cytosine, adenine, thymidine, and uracil can be replaced by other moieties without substantially altering the base pairing properties of an oligonucleotide comprising a nucleotide bearing such replacement moiety. For example, without limitation, a nucleotide comprising inosine as its base can base pair with nucleotides containing adenine, cytosine, or uracil. Hence, nucleotides containing uracil, guanine, or adenine can be replaced in the nucleotide sequences of dsRNA featured in the disclosure by a nucleotide containing, for example, inosine. In another example, adenine and cytosine anywhere in the oligonucleotide can be replaced with guanine and uracil, respectively to form G-U Wobble base pairing with the target mRNA. Sequences containing such replacement moieties are suitable for the compositions and methods featured in the disclosure.

[0072] The terms “iRNA”, “RNAi agent,” “iRNA agent,” “RNA interference agent” as used interchangeably herein, refer to an agent that contains RNA as that term is defined herein, and which mediates the targeted cleavage of an RNA transcript via an RNA-induced silencing complex (RISC) pathway. RNA interference (RNAi) is a process that directs the sequence-specific degradation of mRNA. RNAi modulates, e.g., inhibits, the expression of APP in a cell, e.g., a cell within a subject, such as a mammalian subject.

[0073] In one embodiment, an RNAi agent of the disclosure includes a single stranded RNAi that interacts with a target RNA sequence, e.g., an APP target mRNA sequence, to direct the cleavage of the target RNA. Without wishing to be bound by theory it is believed that long double stranded RNA introduced into cells is broken down into double-stranded short interfering RNAs (siRNAs) comprising a sense strand and an antisense strand by a Type III endonuclease known as Dicer (Sharp et al. (2001) Genes Dev. 15: 485). Dicer, a ribonuclease-III-like enzyme, processes these dsRNA into 19-23 base pair short interfering RNAs with characteristic two base 3′ overhangs (Bernstein, et al., (2001) Nature 409: 363). These siRNAs are then incorporated into an RNA-induced silencing complex (RISC) where one or more helicases unwind the siRNA duplex, enabling the complementary antisense strand to guide target recognition (Nykanen, et al., (2001) Cell 107: 309). Upon binding to the appropriate target mRNA, one or more endonucleases within the RISC cleave the target to induce silencing (Elbashir, et al., (2001) Genes Dev. 15: 188). Thus, in one aspect the disclosure relates to a single stranded RNA (ssRNA) (the antisense strand of a siRNA duplex) generated within a cell and which promotes the formation of a RISC complex to effect silencing of the target gene, i.e., an APP gene. Accordingly, the term “siRNA” is also used herein to refer to an RNAi as described above.

[0074] In another embodiment, the RNAi agent may be a single-stranded RNA that is introduced into a cell or organism to inhibit a target mRNA. Single-stranded RNAi agents bind to the RISC endonuclease, Argonaute 2, which then cleaves the target mRNA. The single-stranded siRNAs are generally 15-30 nucleotides and are chemically modified. The design and testing of single-stranded RNAs are described in U.S. Pat. No. 8,101,348 and in Lima et al., (2012) Cell 150: 883-894, the entire contents of each of which are hereby incorporated herein by reference. Any of the antisense nucleotide sequences described herein may be used as a single-stranded siRNA as described herein or as chemically modified by the methods described in Lima et al., (2012) Cell 150: 883-894.

[0075] In another embodiment, a “RNAi agent” for use in the compositions and methods of the disclosure is a double stranded RNA and is referred to herein as a “double stranded RNAi agent,” “double stranded RNA (dsRNA) molecule,” “dsRNA agent,” or “dsRNA”. The term “dsRNA” refers to a complex of ribonucleic acid molecules, having a duplex structure comprising two anti-parallel and substantially complementary nucleic acid strands, referred to as having “sense” and “antisense” orientations with respect to a target RNA, i.e., an APP gene. In some embodiments of the disclosure, a double stranded RNA (dsRNA) triggers the degradation of a target RNA, e.g., an mRNA, through a post-transcriptional gene-silencing mechanism referred to herein as RNA interference or RNAi.

[0076] In general, a dsRNA molecule can include ribonucleotides, but as described in detail herein, each or both strands can also include one or more non-ribonucleotides, e.g., a deoxyribonucleotide, a modified nucleotide. In addition, as used in this specification, an “RNAi agent” may include ribonucleotides with chemical modifications; an RNAi agent may include substantial modifications at multiple nucleotides.

[0077] As used herein, the term “modified nucleotide” refers to a nucleotide having, independently, a modified sugar moiety, a modified internucleotide linkage, or a modified nucleobase. Thus, the term modified nucleotide encompasses substitutions, additions or removal of, e.g., a functional group or atom, to internucleoside linkages, sugar moieties, or nucleobases. The modifications suitable for use in the agents of the disclosure include all types of modifications disclosed herein or known in the art. Any such modifications, as used in a siRNA type molecule, are encompassed by “RNAi agent” for the purposes of this specification and claims.

[0078] In certain embodiments of the instant disclosure, inclusion of a deoxy-nucleotide—which is acknowledged as a naturally occurring form of nucleotide—if present within an RNAi agent can be considered to constitute a modified nucleotide.

[0079] The duplex region may be of any length that permits specific degradation of a desired target RNA through a RISC pathway, and may range from about 9 to 36 base pairs in length, e.g., about 15-30 base pairs in length, for example, about 9, 10, 11, 12, 13, 14, 15, 16, 17, 18, 19, 20, 21, 22, 23, 24, 25, 26, 27, 28, 29, 30, 31, 32, 33, 34, 35, or 36 base pairs in length, such as about 15-30, 15-29, 15-28, 15-27, 15-26, 15-25, 15-24, 15-23, 15-22, 15-21, 15-20, 15-19, 15-18, 15-17, 18-30, 18-29, 18-28, 18-27, 18-26, 18-25, 18-24, 18-23, 18-22, 18-21, 18-20, 19-30, 19-29, 19-28, 19-27, 19-26, 19-25, 19-24, 19-23, 19-22, 19-21, 19-20, 20-30, 20-29, 20-28, 20-27, 20-26, 20-25, 20-24,20-23, 20-22, 20-21, 21-30, 21-29, 21-28, 21-27, 21-26, 21-25, 21-24, 21-23, or 21-22 base pairs in length. Ranges and lengths intermediate to the above recited ranges and lengths are also contemplated to be part of the invention.

[0080] The two strands forming the duplex structure may be different portions of one larger RNA molecule, or they may be separate RNA molecules. Where the two strands are part of one larger molecule, and therefore are connected by an uninterrupted chain of nucleotides between the 3′-end of one strand and the 5′-end of the respective other strand forming the duplex structure, the connecting RNA chain is referred to as a “hairpin loop.” A hairpin loop can comprise at least one unpaired nucleotide. In some embodiments, the hairpin loop can comprise at at least 4, at least 5, at least 6, at least 7, at least 8, at least 9, at least 10, at least 20, at least 23 or more unpaired nucleotides or nucleotides not directed to the target site of the dsRNA. In some embodiments, the hairpin loop can be 10 or fewer nucleotides. In some embodiments, the hairpin loop can be 8 or fewer unpaired nucleotides. In some embodiments, the hairpin loop can be 4-10 unpaired nucleotides. In some embodiments, the hairpin loop can be 4-8 nucleotides.

[0081] In certain embodiments, the two strands of double-stranded oligomeric compound can be linked together. The two strands can be linked to each other at both ends, or at one end only. By linking at one end is meant that 5′-end of first strand is linked to the 3′-end of the second strand or 3′-end of first strand is linked to 5′-end of the second strand. When the two strands are linked to each other at both ends, 5′-end of first strand is linked to 3′-end of second strand and 3′-end of first strand is linked to 5′-end of second strand. The two strands can be linked together by an oligonucleotide linker including, but not limited to, (N)n; wherein N is independently a modified or unmodified nucleotide and n is 3-23. In some embodiments, n is 3-10, e.g., 3, 4, 5, 6, 7, 8, 9, or 10. In some embodiments, the oligonucleotide linker is selected from the group consisting of GNRA, (G)4, (U)4, and (dT)4, wherein N is a modified or unmodified nucleotide and R is a modified or unmodified purine nucleotide. Some of the nucleotides in the linker can be involved in base-pair interactions with other nucleotides in the linker. The two strands can also be linked together by a non-nucleosidic linker, e.g. a linker described herein. It will be appreciated by one of skill in the art that any oligonucleotide chemical modifications or variations describe herein can be used in the oligonucleotide linker.

[0082] Hairpin and dumbbell type oligomeric compounds will have a duplex region equal to or at least 14, 15, 15, 16, 17, 18, 19, 29, 21, 22, 23, 24, or 25 nucleotide pairs. The duplex region can be equal to or less than 200, 100, or 50, in length. In some embodiments, ranges for the duplex region are 15-30, 17 to 23, 19 to 23, and 19 to 21 nucleotides pairs in length.

[0083] The hairpin oligomeric compounds can have a single strand overhang or terminal unpaired region, in some embodiments at the 3′, and in some embodiments on the antisense side of the hairpin. In some embodiments, the overhangs are 1-4, more generally 2-3 nucleotides in length. The hairpin oligomeric compounds that can induce RNA interference are also referred to as “shRNA” herein.

[0084] Where the two substantially complementary strands of a dsRNA are comprised by separate RNA molecules, those molecules need not, but can be covalently connected. Where the two strands are connected covalently by means other than an uninterrupted chain of nucleotides between the 3′-end of one strand and the 5′-end of the respective other strand forming the duplex structure, the connecting structure is referred to as a “linker.” The RNA strands may have the same or a different number of nucleotides. The maximum number of base pairs is the number of nucleotides in the shortest strand of the dsRNA minus any overhangs that are present in the duplex. In addition to the duplex structure, an RNAi may comprise one or more nucleotide overhangs.

[0085] In one embodiment, an RNAi agent of the disclosure is a dsRNA, each strand of which is 24-30 nucleotides in length, that interacts with a target RNA sequence, e.g., an APP target mRNA sequence, to direct the cleavage of the target RNA. Without wishing to be bound by theory, long double stranded RNA introduced into cells is broken down into siRNA by a Type III endonuclease known as Dicer (Sharp et al. (2001) Genes Dev. 15: 485). Dicer, a ribonuclease-III-like enzyme, processes the dsRNA into 19-23 base pair short interfering RNAs with characteristic two base 3′ overhangs (Bernstein, et al., (2001) Nature 409: 363). The siRNAs are then incorporated into an RNA-induced silencing complex (RISC) where one or more helicases unwind the siRNA duplex, enabling the complementary antisense strand to guide target recognition (Nykanen, et al., (2001) Cell 107: 309). Upon binding to the appropriate target mRNA, one or more endonucleases within the RISC cleave the target to induce silencing (Elbashir, et al., (2001) Genes Dev. 15: 188).

[0086] In one embodiment, an RNAi agent of the disclosure is a dsRNA agent, each strand of which comprises 19-23 nucleotides that interacts with an APP RNA sequence to direct the cleavage of the target RNA. Without wishing to be bound by theory, long double stranded RNA introduced into cells is broken down into siRNA by a Type III endonuclease known as Dicer (Sharp et al. (2001) Genes Dev. 15: 485). Dicer, a ribonuclease-III-like enzyme, processes the dsRNA into 19-23 base pair short interfering RNAs with characteristic two base 3′ overhangs (Bernstein, et al., (2001) Nature 409: 363). The siRNAs are then incorporated into an RNA-induced silencing complex (RISC) where one or more helicases unwind the siRNA duplex, enabling the complementary antisense strand to guide target recognition (Nykanen, et al., (2001) Cell 107: 309). Upon binding to the appropriate target mRNA, one or more endonucleases within the RISC cleave the target to induce silencing (Elbashir, et al., (2001) Genes Dev. 15: 188). In one embodiment, an RNAi agent of the disclosure is a dsRNA of 24-30 nucleotides that interacts with an APP RNA sequence to direct the cleavage of the target RNA.

[0087] As used herein, the term “nucleotide overhang” refers to at least one unpaired nucleotide that protrudes from the duplex structure of an RNAi agent, e.g., a dsRNA. For example, when a 3′-end of one strand of a dsRNA extends beyond the 5′-end of the other strand, or vice versa, there is a nucleotide overhang. A dsRNA can comprise an overhang of at least one nucleotide; alternatively, the overhang can comprise at least two nucleotides, at least three nucleotides, at least four nucleotides, at least five nucleotides or more. A nucleotide overhang can comprise or consist of a nucleotide/nucleoside analog, including a deoxynucleotide/nucleoside. The overhang(s) can be on the sense strand, the antisense strand or any combination thereof. Furthermore, the nucleotide(s) of an overhang can be present on the 5′-end, 3′-end or both ends of either an antisense or sense strand of a dsRNA.

[0088] In one embodiment of the dsRNA, at least one strand comprises a 3′ overhang of at least 1 nucleotide. In another embodiment, at least one strand comprises a 3′ overhang of at least 2 nucleotides, e.g., 2, 3, 4, 5, 6, 7, 9, 10, 11, 12, 13, 14, or 15 nucleotides. In other embodiments, at least one strand of the RNAi agent comprises a 5′ overhang of at least 1 nucleotide. In certain embodiments, at least one strand comprises a 5′ overhang of at least 2 nucleotides, e.g., 2, 3, 4, 5, 6, 7, 9, 10, 11, 12, 13, 14, or 15 nucleotides. In still other embodiments, both the 3′ and the 5′ end of one strand of the RNAi agent comprise an overhang of at least 1 nucleotide.

[0089] In one embodiment, the antisense strand of a dsRNA has a 1-10 nucleotide, e.g., 0-3, 1-3, 2-4, 2-5, 4-10, 5-10, e.g., a 1, 2, 3, 4, 5, 6, 7, 8, 9, or 10 nucleotide, overhang at the 3′-end, the 5′-end, at both ends, or at neither end. In one embodiment, the sense strand of a dsRNA has a 1-10 nucleotide, e.g., a 1, 2, 3, 4, 5, 6, 7, 8, 9, or 10 nucleotide, overhang at the 3′-end, the 5′-end, at both ends, or at neither end. In another embodiment, one or more of the nucleotides in the overhang is replaced with a nucleoside thiophosphate.

[0090] In certain embodiments, the overhang on the sense strand or the antisense strand, or both, can include extended lengths longer than 10 nucleotides, e.g., 1-30 nucleotides, 2-30 nucleotides, 10-30 nucleotides, or 10-15 nucleotides in length. In certain embodiments, an extended overhang is on the sense strand of the duplex. In certain embodiments, an extended overhang is present on the 3′end of the sense strand of the duplex. In certain embodiments, an extended overhang is present on the 5′end of the sense strand of the duplex. In certain embodiments, an extended overhang is on the antisense strand of the duplex. In certain embodiments, an extended overhang is present on the 3′end of the antisense strand of the duplex. In certain embodiments, an extended overhang is present on the 5′end of the antisense strand of the duplex. In certain embodiments, one or more of the nucleotides in the overhang is replaced with a nucleoside thiophosphate. In certain embodiments, the overhang includes a self-complementary portion such that the overhang is capable of forming a hairpin structure that is stable under physiological conditions.

[0091] The terms “blunt” or “blunt ended” as used herein in reference to a dsRNA mean that there are no unpaired nucleotides or nucleotide analogs at a given terminal end of a dsRNA, i.e., no nucleotide overhang. One or both ends of a dsRNA can be blunt. Where both ends of a dsRNA are blunt, the dsRNA is said to be blunt ended. To be clear, a “blunt ended” dsRNA is a dsRNA that is blunt at both ends, i.e., no nucleotide overhang at either end of the molecule. Most often such a molecule will be double stranded over its entire length.

[0092] The term “antisense strand” or “guide strand” refers to the strand of an RNAi agent, e.g., a dsRNA, which includes a region that is substantially complementary to a target sequence, e.g., an APP mRNA.

[0093] As used herein, the term “region of complementarity” refers to the region on the antisense strand that is substantially complementary to a sequence, for example a target sequence, e.g., an APP nucleotide sequence, as defined herein. Where the region of complementarity is not fully complementary to the target sequence, the mismatches can be in the internal or terminal regions of the molecule. Generally, the most tolerated mismatches are in the terminal regions, e.g., within 5, 4, 3, or 2 nucleotides of the 5′- or 3′-terminus of the RNAi agent.

[0094] In some embodiments, a double stranded RNA agent of the disclosure includes a nucleotide mismatch in the antisense strand.

[0095] In some embodiments, the antisense strand of the double stranded RNA agent of the disclosure includes no more than 4 mismatches with the target mRNA, e.g., the antisense strand includes 4, 3, 2, 1, or 0 mismatches with the target mRNA. In some embodiments, the antisense strand double stranded RNA agent of the disclosure includes no more than 4 mismatches with the sense strand, e.g., the antisense strand includes 4, 3, 2, 1, or 0 mismatches with the sense strand. In some embodiments, a double stranded RNA agent of the disclosure includes a nucleotide mismatch in the sense strand. In some embodiments, the sense strand of the double stranded RNA agent of the invention includes no more than 4 mismatches with the antisense strand, e.g., the sense strand includes 4, 3, 2, 1, or 0 mismatches with the antisense strand. In some embodiments, the nucleotide mismatch is, for example, within 5, 4, 3 nucleotides from the 3′-end of the iRNA. In another embodiment, the nucleotide mismatch is, for example, in the 3′-terminal nucleotide of the iRNA agent. In some embodiments, the mismatch(s) is not in the seed region.

[0096] Thus, an RNAi agent as described herein can contain one or more mismatches to the target sequence. In one embodiment, an RNAi agent as described herein contains no more than 3 mismatches (i.e., 3, 2, 1, or 0 mismatches). In one embodiment, an RNAi agent as described herein contains no more than 2 mismatches. In one embodiment, an RNAi agent as described herein contains no more than 1 mismatch. In one embodiment, an RNAi agent as described herein contains 0 mismatches. In certain embodiments, if the antisense strand of the RNAi agent contains mismatches to the target sequence, the mismatch can optionally be restricted to be within the last 5 nucleotides from either the 5′- or 3′-end of the region of complementarity. For example, in such embodiments, for a 23 nucleotide RNAi agent, the strand which is complementary to a region of an APP gene, generally does not contain any mismatch within the central 13 nucleotides. The methods described herein or methods known in the art can be used to determine whether an RNAi agent containing a mismatch to a target sequence is effective in inhibiting the expression of an APP gene. Consideration of the efficacy of RNAi agents with mismatches in inhibiting expression of an APP gene is important, especially if the particular region of complementarity in an APP gene is known to have polymorphic sequence variation within the population.

[0097] The term “sense strand” or “passenger strand” as used herein, refers to the strand of an RNAi agent that includes a region that is substantially complementary to a region of the antisense strand as that term is defined herein.

[0098] As used herein, “substantially all of the nucleotides are modified” are largely but not wholly modified and can include not more than 5, 4, 3, 2, or 1 unmodified nucleotides.

[0099] As used herein, the term “cleavage region” refers to a region that is located immediately adjacent to the cleavage site. The cleavage site is the site on the target at which cleavage occurs. In some embodiments, the cleavage region comprises three bases on either end of, and immediately adjacent to, the cleavage site. In some embodiments, the cleavage region comprises two bases on either end of, and immediately adjacent to, the cleavage site. In some embodiments, the cleavage site specifically occurs at the site bound by nucleotides 10 and 11 of the antisense strand, and the cleavage region comprises nucleotides 11, 12 and 13.

[0100] As used herein, and unless otherwise indicated, the term “complementary,” when used to describe a first nucleotide sequence in relation to a second nucleotide sequence, refers to the ability of an oligonucleotide or polynucleotide comprising the first nucleotide sequence to hybridize and form a duplex structure under certain conditions with an oligonucleotide or polynucleotide comprising the second nucleotide sequence, as will be understood by the skilled person. Such conditions can, for example, be stringent conditions, where stringent conditions can include: 400 mM NaCl, 40 mM PIPES pH 6.4, 1 mM EDTA, 50° C. or 70° C. for 12-16 hours followed by washing (see, e.g., “Molecular Cloning: A Laboratory Manual, Sambrook, et al. (1989) Cold Spring Harbor Laboratory Press). Other conditions, such as physiologically relevant conditions as can be encountered inside an organism, can apply. The skilled person will be able to determine the set of conditions most appropriate for a test of complementarity of two sequences in accordance with the ultimate application of the hybridized nucleotides.

[0101] Complementary sequences within an RNAi agent, e.g., within a dsRNA as described herein, include base-pairing of the oligonucleotide or polynucleotide comprising a first nucleotide sequence to an oligonucleotide or polynucleotide comprising a second nucleotide sequence over the entire length of one or both nucleotide sequences. Such sequences can be referred to as “fully complementary” with respect to each other herein. However, where a first sequence is referred to as “substantially complementary” with respect to a second sequence herein, the two sequences can be fully complementary, or they can form one or more, but generally not more than 5, 4, 3 or 2 mismatched base pairs upon hybridization for a duplex up to 30 base pairs, while retaining the ability to hybridize under the conditions most relevant to their ultimate application, e.g., inhibition of gene expression via a RISC pathway. However, where two oligonucleotides are designed to form, upon hybridization, one or more single stranded overhangs, such overhangs shall not be regarded as mismatches with regard to the determination of complementarity. For example, a dsRNA comprising one oligonucleotide 21 nucleotides in length and another oligonucleotide 23 nucleotides in length, wherein the longer oligonucleotide comprises a sequence of 21 nucleotides that is fully complementary to the shorter oligonucleotide, can yet be referred to as “fully complementary” for the purposes described herein.

[0102] “Complementary” sequences, as used herein, can also include, or be formed entirely from, non-Watson-Crick base pairs or base pairs formed from non-natural and modified nucleotides, in so far as the above requirements with respect to their ability to hybridize are fulfilled. Such non-Watson-Crick base pairs include, but are not limited to, G:U Wobble or Hoogstein base pairing.

[0103] The terms “complementary,” “fully complementary” and “substantially complementary” herein can be used with respect to the base matching between the sense strand and the antisense strand of a dsRNA, or between the antisense strand of an RNAi agent and a target sequence, as will be understood from the context of their use.

[0104] As used herein, a polynucleotide that is “substantially complementary to at least part of” a messenger RNA (mRNA) refers to a polynucleotide that is substantially complementary to a contiguous portion of the mRNA of interest (e.g., an mRNA encoding APP). For example, a polynucleotide is complementary to at least a part of an APP mRNA if the sequence is substantially complementary to a non-interrupted portion of an mRNA encoding APP.

[0105] Accordingly, in some embodiments, the antisense strand polynucleotides disclosed herein are fully complementary to the target APP sequence.

[0106] In certain embodiments, the antisense strand polynucleotides disclosed herein are substantially complementary to the target APP sequence and comprise a contiguous nucleotide sequence which is at least about 80% complementary over its entire length to the equivalent region of the nucleotide sequence of SEQ ID NOs: 4, 7, 10, 13, 16, 19, 22, 25, 28, 31, 34, 37, 40 or 43 for APP, or a fragment of SEQ ID NOs: 4, 7, 10, 13, 16, 19, 22, 25, 28, 31, 34, 37, 40 or 43, such as about 85%, about 86%, about 87%, about 88%, about 89%, about 90%, about 91%, about 92%, about 93%, about 94%, about 95%, about 96%, about 97%, about 98%, or about 99% complementary.

[0107] In other embodiments, the antisense polynucleotides disclosed herein are substantially complementary to the target APP sequence and comprise a contiguous nucleotide sequence which is at least about 80% complementary over its entire length to any one of the sense strand nucleotide sequences in any one of Tables 2-21, or a fragment of any one of the sense strand nucleotide sequences in any one of Tables 2-21, such as about 85%, about 86%, about 87%, about 88%, about 89%, about 90%, about 91%, about 92%, about 93%, about 94%, about 95%, about 96%, about 97%, about 98%, or about 99% complementary.

[0108] In one embodiment, an RNAi agent of the disclosure includes a sense strand that is substantially complementary to an antisense polynucleotide which, in turn, is the same as a target APP sequence, and wherein the sense strand polynucleotide comprises a contiguous nucleotide sequence which is at least about 80% complementary over its entire length to the equivalent region of the nucleotide sequence of SEQ ID NOs: 5, 8, 11, 14, 17, 20, 23, 26, 29, 32, 35, 38, 41 or 44, or a fragment of any one of SEQ ID NOs: 5, 8, 11, 14, 17, 20, 23, 26, 29, 32, 35, 38, 41 or 44, such as about 85%, about 86%, about 87%, about 88%, about 89%, about 90%, about 91%, about 92%, about 93%, about 94%, about 95%, about 96%, about 97%, about 98%, or about 99% complementary.

[0109] In some embodiments, an iRNA of the disclosure includes a sense strand that is substantially complementary to an antisense polynucleotide which, in turn, is complementary to a target APP sequence, and wherein the sense strand polynucleotide comprises a contiguous nucleotide sequence which is at least about 80% complementary over its entire length to any one of the antisense strand nucleotide sequences in any one of any one of Tables 2-21, or a fragment of any one of the antisense strand nucleotide sequences in any one of Tables 2-21, such as about 85%, about 90%, about 91%, about 92%, about 93%, about 94%, about 95%, about 96%, about 97%, about 98%, about 99%, or 100% complementary

[0110] In some embodiments, the double-stranded region of a double-stranded iRNA agent is equal to or at least, 10, 11, 12, 13, 14, 15, 16, 17, 18, 19, 20, 21, 22, 23, 23, 24, 25, 26, 27, 28, 29, 30 or more nucleotide pairs in length.

[0111] In some embodiments, the antisense strand of a double-stranded iRNA agent is equal to or at least 14, 15, 16, 17, 18, 19, 20, 21, 22, 23, 23, 24, 25, 26, 27, 28, 29, or 30 nucleotides in length.

[0112] In some embodiments, the sense strand of a double-stranded iRNA agent is equal to or at least 10, 11, 12, 13, 14, 15, 16, 17, 18, 19, 20, 21, 22, 23, 23, 24, 25, 26, 27, 28, 29, or 30 nucleotides in length.

[0113] In one embodiment, the sense and antisense strands of the double-stranded iRNA agent are each 15 to 30 nucleotides in length.

[0114] In one embodiment, the sense and antisense strands of the double-stranded iRNA agent are each 19 to 25 nucleotides in length.

[0115] In one embodiment, the sense and antisense strands of the double-stranded iRNA agent are each 21 to 23 nucleotides in length.

[0116] In one embodiment, the sense strand of the iRNA agent is 21-nucleotides in length, and the antisense strand is 23-nucleotides in length, wherein the strands form a double-stranded region of 21 consecutive base pairs having a 2-nucleotide long single stranded overhangs at the 3′-end.

[0117] In some embodiments, the majority of nucleotides of each strand are ribonucleotides, but as described in detail herein, each or both strands can also include one or more non-ribonucleotides, e.g., a deoxyribonucleotide or a modified nucleotide. In addition, an “iRNA” may include ribonucleotides with chemical modifications. Such modifications may include all types of modifications disclosed herein or known in the art. Any such modifications, as used in an iRNA molecule, are encompassed by “iRNA” for the purposes of this specification and claims.

[0118] In one aspect of the disclosure, an agent for use in the methods and compositions of the disclosure is a single-stranded antisense nucleic acid molecule that inhibits a target mRNA via an antisense inhibition mechanism. The single-stranded antisense RNA molecule is complementary to a sequence within the target mRNA. The single-stranded antisense oligonucleotides can inhibit translation in a stoichiometric manner by base pairing to the mRNA and physically obstructing the translation machinery, see Dias, N. et al., (2002) Mol Cancer Ther 1: 347-355. The single-stranded antisense RNA molecule may be about 15 to about 30 nucleotides in length and have a sequence that is complementary to a target sequence. For example, the single-stranded antisense RNA molecule may comprise a sequence that is at least about 15, 16, 17, 18, 19, 20, or more contiguous nucleotides from any one of the antisense sequences described herein.

[0119] In one embodiment, at least partial suppression of the expression of an APP gene, is assessed by a reduction of the amount of APP mRNA which can be isolated from or detected in a first cell or group of cells in which an APP gene is transcribed and which has or have been treated such that the expression of an APP gene is inhibited, as compared to a second cell or group of cells substantially identical to the first cell or group of cells but which has or have not been so treated (control cells). The degree of inhibition may be expressed in terms of:

$$\frac{( mRNA in control cells ) - ( mRNA in treated cells )}{( mRNA in control cells )} \cdot 100 \%$$

[0120] The phrase “contacting a cell with an RNAi agent,” such as a dsRNA, as used herein, includes contacting a cell by any possible means. Contacting a cell with an RNAi agent includes contacting a cell in vitro with the RNAi agent or contacting a cell in vivo with the RNAi agent. The contacting may be done directly or indirectly. Thus, for example, the RNAi agent may be put into physical contact with the cell by the individual performing the method, or alternatively, the RNAi agent may be put into a situation that will permit or cause it to subsequently come into contact with the cell.

[0121] Contacting a cell in vitro may be done, for example, by incubating the cell with the RNAi agent. Contacting a cell in vivo may be done, for example, by injecting the RNAi agent into or near the tissue where the cell is located, or by injecting the RNAi agent into another area, e.g., the central nervous system (CNS), optionally via intrathecal, intravitreal or other injection, or to the bloodstream or the subcutaneous space, such that the agent will subsequently reach the tissue where the cell to be contacted is located. For example, the RNAi agent may contain or be coupled to a ligand, e.g., a lipophilic moiety or moieties as described below and further detailed, e.g., in PCT/US2019/031170, which is incorporated herein by reference, that directs or otherwise stabilizes the RNAi agent at a site of interest, e.g., the CNS. In some embodiments, the RNAi agent may contain or be coupled to a ligand, e.g., one or more GalNAc derivatives as described below, that directs or otherwise stabilizes the RNAi agent at a site of interest, e.g., the liver. In other embodiments, the RNAi agent may contain or be coupled to a lipophilic moiety or moieties and one or more GalNAc derivatives. Combinations of in vitro and in vivo methods of contacting are also possible. For example, a cell may also be contacted in vitro with an RNAi agent and subsequently transplanted into a subject.

[0122] In one embodiment, contacting a cell with an RNAi agent includes “introducing” or “delivering the RNAi agent into the cell” by facilitating or effecting uptake or absorption into the cell. Absorption or uptake of an RNAi agent can occur through unaided diffusive or active cellular processes, or by auxiliary agents or devices. Introducing an RNAi agent into a cell may be in vitro or in vivo. For example, for in vivo introduction, an RNAi agent can be injected into a tissue site or administered systemically. In vitro introduction into a cell includes methods known in the art such as electroporation and lipofection. Further approaches are described herein below or are known in the art.

[0123] The term “lipophile” or “lipophilic moiety” broadly refers to any compound or chemical moiety having an affinity for lipids. One way to characterize the lipophilicity of the lipophilic moiety is by the octanol-water partition coefficient, log K_{ow}, where K_{ow} is the ratio of a chemical's concentration in the octanol-phase to its concentration in the aqueous phase of a two-phase system at equilibrium. The octanol-water partition coefficient is a laboratory-measured property of a substance. However, it may also be predicted by using coefficients attributed to the structural components of a chemical which are calculated using first-principle or empirical methods (see, for example, Tetko et al., J. Chem. Inf Comput. Sci. 41: 1407-21 (2001), which is incorporated herein by reference in its entirety). It provides a thermodynamic measure of the tendency of the substance to prefer a non-aqueous or oily milieu rather than water (i.e. its hydrophilic/lipophilic balance). In principle, a chemical substance is lipophilic in character when its log K_{ow} exceeds 0. Typically, the lipophilic moiety possesses a log K_{ow} exceeding 1, exceeding 1.5, exceeding 2, exceeding 3, exceeding 4, exceeding 5, or exceeding 10. For instance, the log K_{ow} of 6-amino hexanol, for instance, is predicted to be approximately 0.7. Using the same method, the log K_{ow} of cholesteryl N-(hexan-6-ol) carbamate is predicted to be 10.7.

[0124] The lipophilicity of a molecule can change with respect to the functional group it carries. For instance, adding a hydroxyl group or amine group to the end of a lipophilic moiety can increase or decrease the partition coefficient (e.g., log K_{ow}) value of the lipophilic moiety.

[0125] Alternatively, the hydrophobicity of the double-stranded RNAi agent, conjugated to one or more lipophilic moieties, can be measured by its protein binding characteristics. For instance, in certain embodiments, the unbound fraction in the plasma protein binding assay of the double-stranded RNAi agent could be determined to positively correlate to the relative hydrophobicity of the double-stranded RNAi agent, which could then positively correlate to the silencing activity of the double-stranded RNAi agent.

[0126] In one embodiment, the plasma protein binding assay determined is an electrophoretic mobility shift assay (EMSA) using human serum albumin protein. An exemplary protocol of this binding assay is illustrated in detail in, e.g., PCT/US2019/031170. The hydrophobicity of the double-stranded RNAi agent, measured by fraction of unbound siRNA in the binding assay, exceeds 0.15, exceeds 0.2, exceeds 0.25, exceeds 0.3, exceeds 0.35, exceeds 0.4, exceeds 0.45, or exceeds 0.5 for an enhanced in vivo delivery of siRNA.

[0127] Accordingly, conjugating the lipophilic moieties to the internal position(s) of the double-stranded RNAi agent provides optimal hydrophobicity for the enhanced in vivo delivery of siRNA.

[0128] The term “lipid nanoparticle” or “LNP” refers to a vesicle comprising a lipid layer encapsulating a pharmaceutically active molecule, such as a nucleic acid molecule, e.g., an RNAi agent or a plasmid from which an RNAi agent is transcribed. LNPs are described in, for example, U.S. Pat. Nos. 6,858,225, 6,815,432, 8,158,601, and 8,058,069, the entire contents of which are hereby incorporated herein by reference.

[0129] As used herein, a “subject” is an animal, such as a mammal, including a primate (such as a human, a non-human primate, e.g., a monkey, and a chimpanzee), or a non-primate (such as a rat, or a mouse). In a preferred embodiment, the subject is a human, such as a human being treated or assessed for a disease, disorder, or condition that would benefit from reduction in APP expression; a human at risk for a disease, disorder, or condition that would benefit from reduction in APP expression; a human having a disease, disorder, or condition that would benefit from reduction in APP expression; or human being treated for a disease, disorder, or condition that would benefit from reduction in APP expression as described herein.

[0130] As used herein, the terms “treating” or “treatment” refer to a beneficial or desired result including, but not limited to, alleviation or amelioration of one or more signs or symptoms associated with APP gene expression or APP protein production further characterized by enlarged neuronal cell endosomes, e.g., APP-associated neurodegenerative disease characterized by enlarged neuronal cell endosomes, Alzheimer's disease (AD) or Down syndrome (DS), specifically including, e.g., decreased expression or activity of APP, e.g., in regions of increased or stable behavior/cognition during and/or following treatment; decreased or inhibited neuroinflammation, gliosis, amyloidosis and/or tauopathy during and/or following treatment; lessening of the rate of decline, stabilization and/or improvement of speech and movement, etc. during and/or following treatment, in subjects having such neurodegenerative diseases. “Treatment” can also mean prolonging survival as compared to expected survival in the absence of treatment.

[0131] The term “lower” in the context of the level of APP in a subject or a disease marker or symptom refers to a statistically significant decrease in such level. The decrease can be, for example, at least 10%, 15%, 20%, 25%, 30%, %, 40%, 45%, 50%, 55%, 60%, 65%, 70%, 75%, 80%, 85%, 90%, 95%, or more. In certain embodiments, a decrease is at least 20%. In certain embodiments, the decrease is at least 50% in a disease marker, e.g., protein or gene expression level. “Lower” in the context of the level of APP in a subject is optionally down to a level accepted as within the range of normal for an individual without such disorder. In certain embodiments, “lower” is the decrease in the difference between the level of a marker or symptom for a subject suffering from a disease and a level accepted within the range of normal for an individual, e.g., the level of decrease in the observed gap between behavior/cognition, speech, etc., in an individual having AD or DS and an individual not having AD or DS or having symptoms that are within the range of normal.

[0132] As used herein, “prevention” or “preventing,” when used in reference to a disease or disorder characterized by enlarged neuronal cell endosomes, that would benefit from a reduction in expression of an APP gene or production of APP protein, e.g., in a subject susceptible to an APP-associated disorder characterized by enlarged neuronal cell endosomes due to, e.g., genetic factors or age, wherein the subject does not yet meet the diagnostic criteria for the APP-associated disorder characterized by enlarged neuronal cell endosomes. As used herein, prevention can be understood as administration of an agent to a subject who does not yet meet the diagnostic criteria for the APP-associated disorder characterized by enlarged neuronal cell endosomes to delay or reduce the likelihood that the subject will develop the APP-associated disorder characterized by enlarged neuronal cell endosomes. As the agent is a pharmaceutical agent, it is understood that administration typically would be under the direction of a health care professional capable of identifying a subject who does not yet meet the diagnostic criteria for an APP-associated disorder characterized by enlarged neuronal cell endosomes as being susceptible to developing an APP-associated disorder characterized by enlarged neuronal cell endosomes. Diagnostic criteria for AD and DS, and risk factors for these disorders are provided herein, and include identification of a genetic predisposition to AD, among others. The likelihood of developing, e.g., AD or DS, is reduced, for example, when an individual having one or more risk factors for AD or DS either fails to develop AD or DS or develops AD or DS with less severity relative to a population having the same risk factors and not receiving treatment as described herein. The failure to develop an APP-associated disorder characterized by enlarged neuronal cell endosomes, e.g., AD or DS, or a delay in the time to develop AD or DS by months or years is considered effective prevention. Prevention may require administration of more than one dose of the iRNA agent. Provided with appropriate methods to identify subjects at risk to develop any of the APP-associated diseases characterized by enlarged neuronal cell endosomes above, the iRNA agents provided herein can be used as pharmaceutical agents for or in methods of prevention of APP-associated diseases characterized by enlarged neuronal cell endosomes. Risk factors for various APP-associated diseases characterized by enlarged neuronal cell endosomes are discussed herein.

[0133] As used herein, the term “APP-associated disease characterized by enlarged endosomes” or “APP-associated disorder characterized by enlarged endosomes” is understood as Alzheimer's disease (AD) or Down syndrome (DS), in certain embodiments also including Parkinson's Disease (PD), amyotrophic lateral sclerosis (ALS), frontotemporal dementia (FTD), Niemann-Pick Disease type C (NPC), macular degeneration, and Huntington's Disease (HD), or in certain embodiments, only AD. The majority of people with Alzheimer's disease are 65 and older, and the greatest risk factor for developing AD is increasing age. AD is a progressive disease, where dementia symptoms gradually get worse over a number of years. In the early stages, there may be a mild amount of memory loss, but in late stage AD, a person loses the ability to converse, and has confusion over the identity of people, places and things. Early signs of AD are memory loss that disrupts daily life, difficulty completing familiar tasks, inability to plan or solve problems, trouble understanding visual images and spatial relationships, confusion about the time or place, problems with words in speaking or writing, decreased or poor judgment, misplacing things, withdrawing from social activities, and changes in mood and personality.

[0134] In one embodiment, an APP-associated disease characterized by enlarged neuronal cell endosomes is “Down syndrome” (“DS”). Down syndrome (DS) is a genetic disorder caused when abnormal cell division results in an extra full or partial copy of chromosome 21. This extra genetic material causes the developmental changes and physical features of Down syndrome, which include (with varying severity) lifelong intellectual disability (cognitive impairment) and developmental delays, among other medical abnormalities, such as heart and gastrointestinal (GI) disorders.

[0135] The term “dementia”, as used herein, refers to the term commonly known by a person skilled in the art. According to the World Health Organization (WHO), dementia is a syndrome—usually of a chronic or progressive nature—in which there is deterioration in cognitive function beyond what might be expected from normal ageing. It affects memory, thinking, orientation, comprehension, calculation, learning capacity, language, and judgement. Consciousness is not affected. The impairment in cognitive function is commonly accompanied, and occasionally preceded, by deterioration in emotional control, social behavior, or motivation. Dementia results from a variety of diseases and injuries that primarily or secondarily affect the brain, such as Alzheimer's disease or stroke. Alzheimer disease is the most common form and may contribute to 60-70% of cases. Other major forms include vascular dementia, dementia with Lewy bodies (abnormal aggregates of protein that develop inside nerve cells), and a group of diseases that contribute to frontotemporal dementia (degeneration of the frontal lobe of the brain).

[0136] “Therapeutically effective amount,” as used herein, is intended to include the amount of an RNAi agent that, when administered to a subject having an APP-associated disease characterized by enlarged neuronal cell endosomes, is sufficient to effect treatment of the disease (e.g., by diminishing, ameliorating, or maintaining the existing disease or one or more symptoms of disease). The “therapeutically effective amount” may vary depending on the RNAi agent, how the agent is administered, the disease and its severity and the history, age, weight, family history, genetic makeup, the types of preceding or concomitant treatments, if any, and other individual characteristics of the subject to be treated.

[0137] “Prophylactically effective amount,” as used herein, is intended to include the amount of an RNAi agent that, when administered to a subject having an APP-associated disorder characterized by enlarged neuronal cell endosomes, is sufficient to prevent or ameliorate the disease or one or more symptoms of the disease. Ameliorating the disease includes slowing the course of the disease or reducing the severity of later-developing disease. The “prophylactically effective amount” may vary depending on the RNAi agent, how the agent is administered, the degree of risk of disease, and the history, age, weight, family history, genetic makeup, the types of preceding or concomitant treatments, if any, and other individual characteristics of the patient to be treated.

[0138] A “therapeutically-effective amount” or “prophylactically effective amount” also includes an amount of an RNAi agent that produces some desired local or systemic effect at a reasonable benefit/risk ratio applicable to any treatment. An RNAi agent employed in the methods of the present disclosure may be administered in a sufficient amount to produce a reasonable benefit/risk ratio applicable to such treatment.

[0139] The phrase “pharmaceutically acceptable” is employed herein to refer to those compounds, materials, compositions, or dosage forms which are, within the scope of sound medical judgment, suitable for use in contact with the tissues of human subjects and animal subjects without excessive toxicity, irritation, allergic response, or other problem or complication, commensurate with a reasonable benefit/risk ratio.

[0140] The phrase “pharmaceutically-acceptable carrier” as used herein means a pharmaceutically-acceptable material, composition or vehicle, such as a liquid or solid filler, diluent, excipient, manufacturing aid (e.g., lubricant, talc magnesium, calcium or zinc stearate, or steric acid), or solvent encapsulating material, involved in carrying or transporting the subject compound from one organ, or portion of the body, to another organ, or portion of the body. Each carrier must be “acceptable” in the sense of being compatible with the other ingredients of the formulation and not injurious to the subject being treated. Some examples of materials which can serve as pharmaceutically-acceptable carriers include: (1) sugars, such as lactose, glucose and sucrose; (2) starches, such as corn starch and potato starch; (3) cellulose, and its derivatives, such as sodium carboxymethyl cellulose, ethyl cellulose and cellulose acetate; (4) powdered tragacanth; (5) malt; (6) gelatin; (7) lubricating agents, such as magnesium state, sodium lauryl sulfate and talc; (8) excipients, such as cocoa butter and suppository waxes; (9) oils, such as peanut oil, cottonseed oil, safflower oil, sesame oil, olive oil, corn oil and soybean oil; (10) glycols, such as propylene glycol; (11) polyols, such as glycerin, sorbitol, mannitol and polyethylene glycol; (12) esters, such as ethyl oleate and ethyl laurate; (13) agar; (14) buffering agents, such as magnesium hydroxide and aluminum hydroxide; (15) alginic acid; (16) pyrogen-free water; (17) isotonic saline; (18) Ringer's solution; (19) ethyl alcohol; (20) pH buffered solutions; (21) polyesters, polycarbonates or polyanhydrides; (22) bulking agents, such as polypeptides and amino acids (23) serum component, such as serum albumin, HDL and LDL; and (22) other non-toxic compatible substances employed in pharmaceutical formulations.

[0141] The term “sample,” as used herein, includes a collection of similar fluids, cells, or tissues isolated from a subject, as well as fluids, cells, or tissues present within a subject. Examples of biological fluids include blood, serum and serosal fluids, plasma, cerebrospinal fluid, ocular fluids, lymph, urine, saliva, and the like. Tissue samples may include samples from tissues, organs or localized regions. For example, samples may be derived from particular organs, parts of organs, or fluids or cells within those organs. In certain embodiments, samples may be derived from the brain (e.g., whole brain or certain segments of brain, e.g., frontal lobe, entorhinal cortex of medial temporal lobe, hippocampus, cerebral cortex, basal ganglia, substantia nigra, or certain types of cells in the brain, such as, e.g., neurons and glial cells (astrocytes, oligodendrocytes, microglial cells)). In other embodiments, a “sample derived from a subject” refers to liver tissue (or subcomponents thereof) derived from the subject. In some embodiments, a “sample derived from a subject” refers to blood drawn from the subject or plasma or serum derived therefrom. In further embodiments, a “sample derived from a subject” refers to brain tissue (or subcomponents thereof) or retinal tissue (or subcomponents thereof) derived from the subject.

[0142] It will be understood that, although the sequences in Tables 2, 3, 5, 7, 9, 11, 13-17, 19 and 20 are described or shown as modified or conjugated sequences, the RNA of the RNAi agent of the disclosure e.g., a dsRNA of the disclosure, may comprise any one of the sequences set forth in any one of Tables 2-21 that is un-modified, un-conjugated, or modified or conjugated differently than described therein. That is, for example, the modified sequences provided in Table 2 do not require the L96 ligand, or any ligand. Similarly, the exemplary modified sequences provided in Tables 3 and 5 do not require the exemplary C16 lipophilic ligand shown, or a lipophilic ligand in the position shown. A lipophilic ligand can be included in any of the positions provided in the instant application.

### BRIEF DESCRIPTION OF THE DRAWINGS

[0143] The following detailed description, given by way of example, but not intended to limit the disclosure solely to the specific embodiments described, may best be understood in conjunction with the accompanying drawings, in which:

[0144] FIG. 1 shows a study design for evaluation of APP-targeting RNAi agents in culture cells.

[0145] FIGS. 2A and 2B show results of examining spheroids in culture for morphology following treatment with APP-targeting RNAi agent. FIG. 2A shows pre-treatment morphology. FIG. 2B shows unchanged morphology at a 14 day time point after administration of APP-targeting siRNAs/compounds.

[0146] FIG. 3 shows a waveform analysis performed upon spheroid data, in which parameters that described the number, size and shape of spontaneous calcium oscillations in each spheroid were extracted. In total, eight parameters were evaluated: peak count, peak height, peak height standard deviation (SD), peak width, peak spacing, peak spacing standard deviation (SD), peak rise time and peak decay time. All values were normalized to vehicle control and were plotted as a percentage.

[0147] FIG. 4 shows a series of graphs that demonstrate that minimal modulation of peak count and peak height was observed across treatment groups and concentrations, regardless of whether an APP-targeting RNAi agent (ΔD454844.47) or a small molecule β-Site Amyloid Precursor Protein Cleaving Enzyme (BACE) inhibitor (LY2886721) was administered.

[0148] FIGS. 5A and 5B show bar graphs that demonstrate observed sAPPα and sAPPβ levels in cell media. FIG. 5A shows that in spheroid cell media, the APP-targeting siRNA exhibited dose-dependent inhibition of sAPPα levels, whereas the BACE inhibitor LY2886721 exhibited no impact on sAPPα levels in cell media. FIG. 5B shows that when sAPPβ levels were assessed in spheroid cell media, both the APP-targeting siRNA and the BACE inhibitor LY2886721 exhibited dose-dependent inhibition of sAPPβ levels.

[0149] FIGS. 6A and 6B show bar graphs that demonstrate observed sAPPα and sAPPβ levels in spheroid cell lysates. FIG. 6A shows that in spheroid cell lysates, the APP-targeting siRNA again exhibited dose-dependent inhibition of sAPPα levels, whereas the BACE inhibitor LY2886721 exhibited no impact on sAPPα levels. FIG. 6A shows that when sAPPβ levels were assessed in spheroid cell lysates, both the APP-targeting siRNA and the BACE inhibitor LY2886721 exhibited dose-dependent inhibition of sAPPβ levels.

[0150] FIGS. 7A and 7B show the bar graphs of FIGS. 5B and 6B above, in a manner that provides for easier comparison of results.

[0151] FIG. 8 shows a flow-chart depiction of the process of generating iPSC-derived neurons from a PSEN1 A246E patient, which were then administered either a control (AD-1397409, anti-luciferase, see Table 22 below for AD-1397409 sequences) siRNA or the APP-targeting siRNA AD-454844.

[0152] FIGS. 9A and 9B show that APP knockdown via administration of an APP-targeting siRNA robustly reduced enlarged endosome size otherwise observed in untreated PSEN1-mutant cells. Significantly elevated Rab5+ endosome sizes were previously observed in cells homozygous for PSEN1 A246E. FIG. 9A shows immunofluorescent Rab5 imaging, which revealed that treatment of cells homozygous for PSEN1 A246E with the APP-targeting siRNA AD-454844 significantly reduced endosome size, as compared to control (CTL) luciferase-targeting siRNA AD-1397409. Specifically, PSEN1^{A246E} patient induced pluripotent stem cell (iPSC)-derived cortical neuron model cells were treated with an APP-targeted siRNA or the luciferase-targeting control siRNA AD-1397409. FIG. 9B shows a series of bar graphs that quantitate: in the left panel, the extent of APP mRNA knockdown observed in AD-454844-treated and control (AD-1397409)-treated mutant cells; in the middle panel, the immunofluorescent Rab5+(early endosome) imaging data obtained, which revealed a statistically significant reduction in maximum early endosome size in APP-targeting siRNA AD-454844-treated cells; and in the right panel, the immunofluorescent Rab7+(Rab7 localizes to both early and late endosomes/multivesicular bodies (LEs/MVBs) and was labeled with Alexa 528) imaging data obtained, which revealed a statistically significant yet more modest reduction in maximum Rab7-associated endosome size in APP-targeting siRNA AD-454844-treated cells, consistent with the APP-targeting siRNA exerting a preferential impact upon early endosome size (as compared to LEs/MVBs).

[0153] FIG. 10 shows that siRNA-mediated APP knockdown was significantly more effective than administration of the APP-targeting small molecule BACE inhibitor LY2886721 in reducing both PCTF levels and early endosome (Rab5+ endosome) size in PSEN1^{A246E} patient iPSC-derived cortical neuron model cells. In all such experiments, dose-response of the APP-targeting siRNA AD-454844 was evaluated at 23 days post-transfection, at later stages (DIV30) of differentiation, while in parallel, the APP-targeting small molecule BACE inhibitor LY2886721 was administered to cells for four days, with evaluation for dose-response performed at DIV30. In the left-hand panel, dose-dependent inhibition of sAPPβ levels was observed for both the APP-targeting siRNA AD-454844 and for the APP-targeting small molecule BACE inhibitor LY2886721, though the APP-targeting siRNA AD-454844 exhibited enhanced potency of sAPPβ knockdown across all concentrations assessed. In the second panel from left, dose-dependent inhibition of sAPPα levels was only observed for the APP-targeting siRNA AD-454844, whereas the APP-targeting small molecule BACE inhibitor LY2886721 exhibited no sAPPα knockdown at any dose tested. In the third panel from left, dose-dependent reduction of APP β-C-terminal fragment (β-CTF) levels was observed for both the APP-targeting siRNA AD-454844 and for the APP-targeting small molecule BACE inhibitor LY2886721, yet significantly more potent reduction of β-CTF was observed for the APP-targeting siRNA AD-454844, as compared to LY2886721. The right-hand panel shows that early endosome (RAB5+ endosome) size was significantly more reduced in PSEN1^{A246E} patient iPSC-derived cortical neuron model cells treated with AD-454844 at 10 nM, as compared to the more modest levels of early endosome size reduction observed for such cells treated with LY2886721 at 10 nM. APP-targeting siRNAs are therefore capable of exerting a preferential effect upon APP forms found in early endosomes and upon early endosome size, that is distinct from that observed for the APP-targeting small molecule BACE inhibitor LY2886721, and that also is distinct from antibody-based therapies (as antibody-based therapeutics do not target intracellular β-CTF).

[0154] FIGS. 11A to 11I demonstrate the efficacy of siRNA-mediated APP silencing in the CVN mouse model; throughout FIGS. 11A to 11I, “siRNA XVIII” represents AD-454972. FIG. 1A shows that the human AD-454972 APP-targeting siRNA reduced APP mRNA and sAPPα protein (aCSF, n=6 per group; AD-454972, n=3 per group). FIG. 11B shows that a single 120 μg ICV bolus dose showed an approximate 75% reduction of APP mRNA at 30 days and >50% reduction at 60 days post-dose. Day 30 and Day 180, n=4 per group; Day 60, n=1 per group; Day 90, n=11 per group). FIG. 11C depicts an overview of the experimental design and disease progression in the CVN mice. Animals were dosed pre-symptomatically and assessed by immunohistochemistry (IHC) for changes in deposition of AB40 (FIGS. 11E and 11F below) and inflammation (IBA1) (FIGS. 11E and 11G below) within the cortex and hippocampus at 3 months or 6 months post-dose. FIG. 11D shows that after 3 months, a reduction of approximately 25% and approximately 50% of APP mRNA was observed in the cortex and hippocampus, respectively, which corresponded to an approximate 50% reduction in sAPPα protein. (aCSF, n=3 per group; AD-454972 APP-targeting siRNA, n=4 per group). FIG. 11E shows changes in deposition of AB40 and inflammation (IBA1) within the cortex and hippocampus at 9 months post-dose of either the aCSF control or the AD-454972 APP-targeting siRNA. FIG. 1F shows tissue AB40 deposits assessed by IHC (aCSF, n=2 per group at 6 months; n=4 for the remaining groups). FIG. 11G shows tissue IBA1 levels assessed by IHC and qPCR (Iba1; aCSF, n=2 per group at 6 months; n=4 for the remaining groups). Simple linear regression was used to compare the slopes. * P<0.05 and P=0.0237 in the AD-454972 APP-targeting siRNA group. FIG. 11H shows glutamate and N-acetylaspartate levels as measured by rH-MRS at 12 months of age (6 months post-dose) showed normalization of glutamate levels in the siRNA-treated group. (WT aCSF, n=9 per group; n=8 per group for the remaining groups. All error bars represent standard error. * P<0.05. Unpaired t-test assuming equal variance was used. CR, creatine. FIG. 1I shows that AD-454972 APP-targeting siRNA-treated animals showed normalization of total distance traveled and rearing frequency. WT aCSF, n=9 per group; n=8 per group for the remaining groups. All error bars represent standard error. * P<0.05; ** P<0.005. Unpaired t-test assuming equal variance was used unless indicated otherwise. NS, not significant.

[0155] The present invention is further illustrated by the following detailed description.

### DETAILED DESCRIPTION OF THE INVENTION

[0156] The present disclosure provides for use of RNAi compositions, which effect the RNA-induced silencing complex (RISC)-mediated cleavage of RNA transcripts of an APP gene, for preclinical, therapeutic or prophylactic purpose to effect robust endosomal size reductions in cells or subjects contacted with such agents, particularly in cells or subjects harboring mutations in presenilin 1 (PSEN1). The APP gene may be within a cell, e.g., a cell within a subject, such as a human. The present disclosure in specific aspects provides methods of using the RNAi compositions of the disclosure for inhibiting the expression of an APP gene or for treating a subject having a disorder that would benefit from inhibiting or reducing the expression of an APP gene, e.g., an APP-associated disease characterized by enlarged neuronal cell endosomes, e.g., Alzheimer's disease (AD) or Down syndrome (DS).

[0157] The RNAi agents of the disclosure include an RNA strand (the antisense strand) having a region which is about 30 nucleotides or less in length, e.g., 15-30, 15-29, 15-28, 15-27, 15-26, 15-25, 15-24, 15-23, 15-22, 15-21, 15-20, 15-19, 15-18, 15-17, 18-30, 18-29, 18-28, 18-27, 18-26, 18-25, 18-24, 18-23, 18-22, 18-21, 18-20, 19-30, 19-29, 19-28, 19-27, 19-26, 19-25, 19-24, 19-23, 19-22, 19-21, 19-20, 20-30, 20-29, 20-28, 20-27, 20-26, 20-25, 20-24, 20-23, 20-22, 20-21, 21-30, 21-29, 21-28, 21-27, 21-26, 21-25, 21-24, 21-23, or 21-22 nucleotides in length, which region is substantially complementary to at least part of an mRNA transcript of an APP gene. In certain embodiments, the RNAi agents of the disclosure include an RNA strand (the antisense strand) having a region which is about 21-23 nucleotides in length, which region is substantially complementary to at least part of an mRNA transcript of an APP gene.

[0158] In certain embodiments, the RNAi agents of the disclosure include an RNA strand (the antisense strand) which can include longer lengths, for example up to 66 nucleotides, e.g., 36-66, 26-36, 25-36, 31-60, 22-43, 27-53 nucleotides in length with a region of at least 19 contiguous nucleotides that is substantially complementary to at least a part of an mRNA transcript of an APP gene. These RNAi agents with the longer length antisense strands optionally include a second RNA strand (the sense strand) of 20-60 nucleotides in length wherein the sense and antisense strands form a duplex of 18-30 contiguous nucleotides.

[0159] The use of these RNAi agents enables the targeted degradation of mRNAs of an APP gene in mammals. Thus, methods and compositions including these RNAi agents are useful for treating a subject who would benefit by a reduction in the levels or activity of an APP protein, such as a subject having an APP-associated neurodegenerative disease characterized by enlarged neuronal cell endosomes, e.g. Alzheimer's disease (AD) or Down syndrome (DS), particularly those associated with mutations in presenilin 1 (PSEN1) in an affected subject.

[0160] It was recently identified that overactivation of Rab5 could induce endosomal dysfunction and produce prodromal and neurodegenerative features of AD (Pensalfini et al. Cell Reports 33, 108420, Nov. 24, 2020), with endosomal size abnormalities also associated with PD, ALS, FTD and HD (Pensalfini et al.), among other conditions. Investigation of endosome size in neuronal cells performed herein has now identified that APP-targeting siRNAs can robustly decrease endosome size in neuronal cells otherwise characterized by enlarged endosomes (caused, e.g., by mutations in PSEN1), with such effect likely exerting a therapeutic benefit to subjects having or at risk of developing mutations that enlarge neuronal cell endosome size. Therapeutic and preventive administration of APP-targeting RNAi agents to subjects having or at risk of developing conditions that produce enlarged neuronal cell endosomes, is therefore contemplated, including, e.g., selection of a subject or group of subjects for administration of APP-targeting RNAi agents as disclosed herein, based upon detection of, e.g., a PSEN1 mutation that characteristically produces enlarged neuronal cell endosomes, or direct detection of enlarged neuronal cell endosomes in a subject.

[0161] Early endosomal abnormalities have been detected in a range of diseases, including, e.g., not only AD and DS (Cataldo et al. J Neurosci Off J Soc Neurosc 23:6788-6792; Cataldo et al. Neurobiol Aging 25:1263-1272; Nixon, R. A. Neurobiol Aging 26:373-382), but also PD (Xu et al., Traffic 19(4): 253-262), Niemann-Pick Disease type C (NPC) (Jin et al. Am J Pathol 164:975-985) and Stargardt macular degeneration (Lakkaraju et al. Proc Natl Acad Sci USA 104:11026-11031; Toops et al. Exp Eye Res 124:74-85; Tan et al. Proc Natl Acad Sci USA 113:8789-8794), as discussed, e.g., in Kaur and Lakkaraju. Adv Exp Med Biol. 2018; 1074: 335-343. It is expressly contemplated herein that RNAi-mediated knockdown of APP as disclosed herein could exert therapeutic or even preventive benefit to subjects having or at risk of developing any of these diseases or disorders.

[0162] The following detailed description discloses how to make and use compositions containing RNAi agents to inhibit the expression of an APP gene, as well as compositions and methods for treating subjects having diseases and disorders that would benefit from inhibition or reduction of the expression of the genes.

### I. RNAi Agents of the Disclosure

[0163] Described herein are RNAi agents which inhibit the expression of an APP gene. In one embodiment, the RNAi agent includes double stranded ribonucleic acid (dsRNA) molecules for inhibiting the expression of an APP gene in a cell, such as a cell within a subject, e.g., a mammal, such as a human having an APP-associated neurodegenerative disease characterized by enlarged neuronal cell endosomes, e.g. Alzheimer's disease (AD) or Down syndrome (DS), particularly examples of such conditions that are associated with mutations in presenilin 1 (PSEN1) in an affected subject. The dsRNA includes an antisense strand having a region of complementarity which is complementary to at least a part of an mRNA formed in the expression of an APP gene. In embodiments, the region of complementarity is about 15-30 nucleotides or less in length. Upon contact with a cell expressing the APP gene, the RNAi agent inhibits the expression of the APP gene (e.g., a human gene, a primate gene, a non-primate gene) by at least 50% as assayed by, for example, a PCR or branched DNA (bDNA)-based method, or by a protein-based method, such as by immunofluorescence analysis, using, for example, western blotting or flowcytometric techniques.

[0164] A dsRNA includes two RNA strands that are complementary and hybridize to form a duplex structure under conditions in which the dsRNA will be used. One strand of a dsRNA (the antisense strand) includes a region of complementarity that is substantially complementary, and generally fully complementary, to a target sequence. The target sequence can be derived from the sequence of an mRNA formed during the expression of an APP gene. The other strand (the sense strand) includes a region that is complementary to the antisense strand, such that the two strands hybridize and form a duplex structure when combined under suitable conditions. As described elsewhere herein and as known in the art, the complementary sequences of a dsRNA can also be contained as self-complementary regions of a single nucleic acid molecule, as opposed to being on separate oligonucleotides.

[0165] Generally, the duplex structure is 15 to 30 base pairs in length, e.g., 15-29, 15-28, 15-27, 15-26, 15-25, 15-24, 15-23, 15-22, 15-21, 15-20, 15-19, 15-18, 15-17, 18-30, 18-29, 18-28, 18-27, 18-26, 18-25, 18-24, 18-23, 18-22, 18-21, 18-20, 19-30, 19-29, 19-28, 19-27, 19-26, 19-25, 19-24, 19-23, 19-22, 19-21, 19-20, 20-30, 20-29, 20-28, 20-27, 20-26, 20-25, 20-24, 20-23, 20-22, 20-21, 21-30, 21-29, 21-28, 21-27, 21-26, 21-25, 21-24, 21-23, or 21-22 base pairs in length. In certain preferred embodiments, the duplex structure is 18 to 25 base pairs in length, e.g., 18-25, 18-24, 18-23, 18-22, 18-21, 18-20, 19-25, 19-24, 19-23, 19-22, 19-21, 19-20, 20-25, 20-24, 20-23, 20-22, 20-21, 21-25, 21-24, 21-23, 21-22, 22-25, 22-24, 22-23, 23-25, 23-24 or 24-25 base pairs in length, for example, 19-21 basepairs in length. Ranges and lengths intermediate to the above recited ranges and lengths are also contemplated to be part of the disclosure.

[0166] Similarly, the region of complementarity to the target sequence is 15 to 30 nucleotides in length, e.g., 15-29, 15-28, 15-27, 15-26, 15-25, 15-24, 15-23, 15-22, 15-21, 15-20, 15-19, 15-18, 15-17, 18-30, 18-29, 18-28, 18-27, 18-26, 18-25, 18-24, 18-23, 18-22, 18-21, 18-20, 19-30, 19-29, 19-28, 19-27, 19-26, 19-25, 19-24, 19-23, 19-22, 19-21, 19-20, 20-30, 20-29, 20-28, 20-27, 20-26, 20-25, 20-24, 20-23, 20-22, 20-21, 21-30, 21-29, 21-28, 21-27, 21-26, 21-25, 21-24, 21-23, or 21-22 nucleotides in length, for example 19-23 nucleotides in length or 21-23 nucleotides in length. Ranges and lengths intermediate to the above recited ranges and lengths are also contemplated to be part of the disclosure.

[0167] In some embodiments, the dsRNA is 15 to 23 nucleotides in length, or 24 to 30 nucleotides in length (optionally, 25 to 30 nucleotides in length). In general, the dsRNA can be long enough to serve as a substrate for the Dicer enzyme. For example, it is well known in the art that dsRNAs longer than about 21-23 nucleotides can serve as substrates for Dicer. As the ordinarily skilled person will also recognize, the region of an RNA targeted for cleavage will most often be part of a larger RNA molecule, often an mRNA molecule. Where relevant, a “part” of an mRNA target is a contiguous sequence of an mRNA target of sufficient length to allow it to be a substrate for RNAi-directed cleavage (i.e., cleavage through a RISC pathway).

[0168] One of skill in the art will also recognize that the duplex region is a primary functional portion of a dsRNA, e.g., a duplex region of about 15 to 36 base pairs, e.g., 15-36, 15-35, 15-34, 15-33, 15-32, 15-31, 15-30, 15-29, 15-28, 15-27, 15-26, 15-25, 15-24, 15-23, 15-22, 15-21, 15-20, 15-19, 15-18, 15-17, 18-30, 18-29, 18-28, 18-27, 18-26, 18-25, 18-24, 18-23, 18-22, 18-21, 18-20, 19-30, 19-29, 19-28, 19-27, 19-26, 19-25, 19-24, 19-23, 19-22, 19-21, 19-20, 20-30, 20-29, 20-28, 20-27, 20-26, 20-25, 20-24, 20-23, 20-22, 20-21, 21-30, 21-29, 21-28, 21-27, 21-26, 21-25, 21-24, 21-23, or 21-22 base pairs, for example, 19-21 base pairs. Thus, in one embodiment, to the extent that it becomes processed to a functional duplex, of e.g., 15-30 base pairs, that targets a desired RNA for cleavage, an RNA molecule or complex of RNA molecules having a duplex region greater than 30 base pairs is a dsRNA. Thus, an ordinarily skilled artisan will recognize that in one embodiment, a miRNA is a dsRNA. In another embodiment, a dsRNA is not a naturally occurring miRNA. In another embodiment, an RNAi agent useful to target APP expression is not generated in the target cell by cleavage of a larger dsRNA.

[0169] A dsRNA as described herein can further include one or more single-stranded nucleotide overhangs e.g., 1, 2, 3, or 4 nucleotides. A nucleotide overhang can comprise or consist of a nucleotide/nucleoside analog, including a deoxynucleotide/nucleoside. The overhang(s) can be on the sense strand, the antisense strand or any combination thereof. Furthermore, the nucleotide(s) of an overhang can be present on the 5′-end, 3′-end or both ends of either an antisense or sense strand of a dsRNA. In certain embodiments, longer, extended overhangs are possible.

[0170] A dsRNA can be synthesized by standard methods known in the art as further discussed below, e.g., by use of an automated DNA synthesizer, such as are commercially available from, for example, Biosearch, Applied Biosystems, Inc.

[0171] iRNA compounds of the disclosure may be prepared using a two-step procedure. First, the individual strands of the double stranded RNA molecule are prepared separately. Then, the component strands are annealed. The individual strands of the siRNA compound can be prepared using solution-phase or solid-phase organic synthesis or both. Organic synthesis offers the advantage that the oligonucleotide strands comprising unnatural or modified nucleotides can be easily prepared. Single-stranded oligonucleotides of the disclosure can be prepared using solution-phase or solid-phase organic synthesis or both.

[0172] An siRNA can be produced, e.g., in bulk, by a variety of methods. Exemplary methods include: organic synthesis and RNA cleavage, e.g., in vitro cleavage.

[0173] An siRNA can be made by separately synthesizing a single stranded RNA molecule, or each respective strand of a double-stranded RNA molecule, after which the component strands can then be annealed.

[0174] A large bioreactor, e.g., the OligoPilot II from Pharmacia Biotec AB (Uppsala Sweden), can be used to produce a large amount of a particular RNA strand for a given siRNA. The OligoPilotII reactor can efficiently couple a nucleotide using only a 1.5 molar excess of a phosphoramidite nucleotide. To make an RNA strand, ribonucleotides amidites are used. Standard cycles of monomer addition can be used to synthesize the 21 to 23 nucleotide strand for the siRNA. Typically, the two complementary strands are produced separately and then annealed, e.g., after release from the solid support and deprotection.

[0175] Organic synthesis can be used to produce a discrete siRNA species. The complementary of the species to an APP gene can be precisely specified. For example, the species may be complementary to a region that includes a polymorphism, e.g., a single nucleotide polymorphism.

[0176] Further the location of the polymorphism can be precisely defined. In some embodiments, the polymorphism is located in an internal region, e.g., at least 4, 5, 7, or 9 nucleotides from one or both of the termini.

[0177] In one embodiment, RNA generated is carefully purified to remove ends. iRNA is cleaved in vitro into siRNAs, for example, using a Dicer or comparable RNAse III-based activity. For example, the dsiRNA can be incubated in an in vitro extract from Drosophila or using purified components, e.g., a purified RNAse or RISC (RNA-induced silencing complex). See, e.g., Ketting et al. Genes Dev 2001 Oct. 15; 15(20): 2654-9 and Hammond Science 2001 Aug. 10; 293(5532): 1146-50.

[0178] dsiRNA cleavage generally produces a plurality of siRNA species, each being a particular 21 to 23 nt fragment of a source dsiRNA molecule. For example, siRNAs that include sequences complementary to overlapping regions and adjacent regions of a source dsiRNA molecule may be present.

[0179] Regardless of the method of synthesis, the siRNA preparation can be prepared in a solution (e.g., an aqueous or organic solution) that is appropriate for formulation. For example, the siRNA preparation can be precipitated and redissolved in pure double-distilled water, and lyophilized. The dried siRNA can then be resuspended in a solution appropriate for the intended formulation process.

[0180] In one aspect, a dsRNA of the disclosure includes at least two nucleotide sequences, a sense sequence and an antisense sequence. The sense strand sequence for APP may be selected from the group of sequences provided in any one of Tables 2-21, and the corresponding nucleotide sequence of the antisense strand of the sense strand may be selected from the group of sequences of any one of Tables 2-21. In this aspect, one of the two sequences is complementary to the other of the two sequences, with one of the sequences being substantially complementary to a sequence of an mRNA generated in the expression of an APP gene. As such, in this aspect, a dsRNA will include two oligonucleotides, where one oligonucleotide is described as the sense strand (passenger strand) in any one of Tables 2-21, and the second oligonucleotide is described as the corresponding antisense strand (guide strand) of the sense strand in any one of Tables 2-21 for APP.

[0181] In one embodiment, the substantially complementary sequences of the dsRNA are contained on separate oligonucleotides. In another embodiment, the substantially complementary sequences of the dsRNA are contained on a single oligonucleotide.

[0182] It will be understood that, although the sequences provided herein are described as modified or conjugated sequences, the RNA of the RNAi agent of the disclosure e.g., a dsRNA of the disclosure, may comprise any one of the sequences set forth in any one of Tables 2-21 that is un-modified, un-conjugated, or modified or conjugated differently than described therein. One or more lipophilic ligands or one or more GalNAc ligands can be included in any of the positions of the RNAi agents provided in the instant application.

[0183] The skilled person is well aware that dsRNAs having a duplex structure of about 20 to 23 base pairs, e.g., 21, base pairs have been hailed as particularly effective in inducing RNA interference (Elbashir et al., (2001) EMBO J., 20: 6877-6888). However, others have found that shorter or longer RNA duplex structures can also be effective (Chu and Rana (2007) RNA 14: 1714-1719; Kim et al. (2005) Nat Biotech 23: 222-226). In the embodiments described above, by virtue of the nature of the oligonucleotide sequences provided herein, dsRNAs described herein can include at least one strand of a length of minimally 21 nucleotides. It can be reasonably expected that shorter duplexes minus only a few nucleotides on one or both ends can be similarly effective as compared to the dsRNAs described above. Hence, dsRNAs having a sequence of at least 15, 16, 17, 18, 19, 20, or more contiguous nucleotides derived from one of the sequences provided herein, and differing in their ability to inhibit the expression of an APP gene by not more than 10, 15, 20, 25, or 30% inhibition from a dsRNA comprising the full sequence using the in vitro assay with Be(2)-C cells and a 10 nM concentration of the RNA agent and the PCR assay as provided in the examples herein, are contemplated to be within the scope of the present disclosure.

[0184] One benchmark assay for inhibition of APP involves contacting human Be(2)-C cells with a dsRNA agent as disclosed herein, where sufficient or effective APP inhibition is identified if at least 5% reduction, at least 10% reduction, at least 15% reduction, at least 20% reduction, at least 25% reduction, at least 30% reduction, at least 35% reduction, at least 40% reduction, at least 45% reduction, at least 50% reduction, at least 55% reduction, at least 60% reduction, at least 65% reduction, at least 70% reduction, at least 75% reduction, at least 80% reduction, at least 85% reduction, at least 90% reduction, at least 95% reduction, at least 97% reduction, at least 98% reduction, at least 99% reduction, or more of APP transcript or protein is observed in contacted cells, as compared to an appropriate control (e.g., cells not contacted with APP-targeting dsRNA). Optionally, a dsRNA agent of the disclosure is administered at 10 nM concentration, and the PCR assay is performed as provided in the examples herein (e.g., Example 2 below).

[0185] In addition, the RNAs described herein identify a site(s) in an APP transcript that is susceptible to RISC-mediated cleavage. As such, the present disclosure further features RNAi agents that target within this site(s). As used herein, an RNAi agent is said to target within a particular site of an RNA transcript if the RNAi agent promotes cleavage of the transcript anywhere within that particular site. Such an RNAi agent will generally include at least about 15 contiguous nucleotides, optionally at least 19 nucleotides, from one of the sequences provided herein coupled to additional nucleotide sequences taken from the region contiguous to the selected sequence in an APP gene.

[0186] An RNAi agent as described herein can contain one or more mismatches to the target sequence. In one embodiment, an RNAi agent as described herein contains no more than 3 mismatches (i.e., 3, 2, 1, or 0 mismatches). In one embodiment, an RNAi agent as described herein contains no more than 2 mismatches. In one embodiment, an RNAi agent as described herein contains no more than 1 mismatch. In one embodiment, an RNAi agent as described herein contains 0 mismatches. In certain embodiments, if the antisense strand of the RNAi agent contains mismatches to the target sequence, the mismatch can optionally be restricted to be within the last 5 nucleotides from either the 5′- or 3′-end of the region of complementarity. For example, in such embodiments, for a 23 nucleotide RNAi agent, the strand which is complementary to a region of an APP gene generally does not contain any mismatch within the central 13 nucleotides. The methods described herein or methods known in the art can be used to determine whether an RNAi agent containing a mismatch to a target sequence is effective in inhibiting the expression of an APP gene. Consideration of the efficacy of RNAi agents with mismatches in inhibiting expression of an APP gene is important, especially if the particular region of complementarity in an APP gene is known to have polymorphic sequence variation within the population.

### II. Modified RNAi Agents of the Disclosure

[0187] In one embodiment, the RNA of the RNAi agent of the disclosure e.g., a dsRNA, is un-modified, and does not comprise, e.g., chemical modifications or conjugations known in the art and described herein. In preferred embodiments, the RNA of an RNAi agent of the disclosure, e.g., a dsRNA, is chemically modified to enhance stability or other beneficial characteristics. In certain embodiments of the disclosure, substantially all of the nucleotides of an RNAi agent of the disclosure are modified. In other embodiments of the disclosure, all of the nucleotides of an RNAi agent of the disclosure are modified. RNAi agents of the disclosure in which “substantially all of the nucleotides are modified” are largely but not wholly modified and can include not more than 5, 4, 3, 2, or 1 unmodified nucleotides. In still other embodiments of the disclosure, RNAi agents of the disclosure can include not more than 5, 4, 3, 2 or 1 modified nucleotides.

[0188] The nucleic acids featured in the disclosure can be synthesized or modified by methods well established in the art, such as those described in “Current protocols in nucleic acid chemistry,” Beaucage, S. L. et al. (Edrs.), John Wiley & Sons, Inc., New York, NY, USA, which is hereby incorporated herein by reference. Modifications include, for example, end modifications, e.g., 5′-end modifications (phosphorylation, conjugation, inverted linkages) or 3′-end modifications (conjugation, DNA nucleotides, inverted linkages, etc.); base modifications, e.g., replacement with stabilizing bases, destabilizing bases, or bases that base pair with an expanded repertoire of partners, removal of bases (abasic nucleotides), or conjugated bases; sugar modifications (e.g., at the 2′-position or 4′-position) or replacement of the sugar; or backbone modifications, including modification or replacement of the phosphodiester linkages. Specific examples of RNAi agents useful in the embodiments described herein include, but are not limited to, RNAs containing modified backbones or no natural internucleoside linkages. RNAs having modified backbones include, among others, those that do not have a phosphorus atom in the backbone. For the purposes of this specification, and as sometimes referenced in the art, modified RNAs that do not have a phosphorus atom in their internucleoside backbone can also be considered to be oligonucleosides. In some embodiments, a modified RNAi agent will have a phosphorus atom in its internucleoside backbone.

[0189] Modified RNA backbones include, for example, phosphorothioates, chiral phosphorothioates, phosphorodithioates, phosphotriesters, aminoalkylphosphotriesters, methyl and other alkyl phosphonates including 3′-alkylene phosphonates and chiral phosphonates, phosphinates, phosphoramidates including 3′-amino phosphoramidate and aminoalkylphosphoramidates, thionophosphoramidates, thionoalkylphosphonates, thionoalkylphosphotriesters, and boranophosphates having normal 3′-5′ linkages, 2′-5′-linked analogs of these, and those having inverted polarity wherein the adjacent pairs of nucleoside units are linked 3′-5′ to 5′-3′ or 2′-5′ to 5′-2′. Various salts, e.g., sodium salts, mixed salts and free acid forms are also included.

[0190] Representative U.S. patents that teach the preparation of the above phosphorus-containing linkages include, but are not limited to, U.S. Pat. Nos. 3,687,808; 4,469,863; 4,476,301; 5,023,243; 5,177,195; 5,188,897; 5,264,423; 5,276,019; 5,278,302; 5,286,717; 5,321,131; 5,399,676; 5,405,939; 5,453,496; 5,455,233; 5,466,677; 5,476,925; 5,519,126; 5,536,821; 5,541,316; 5,550,111; 5,563,253; 5,571,799; 5,587,361; 5,625,050; 6,028,188; 6,124,445; 6,160,109; 6,169,170; 6,172,209; 6,239,265; 6,277,603; 6,326,199; 6,346,614; 6,444,423; 6,531,590; 6,534,639; 6,608,035; 6,683,167; 6,858,715; 6,867,294; 6,878,805; 7,015,315; 7,041,816; 7,273,933; 7,321,029; and U.S. Pat. RE39464, the entire contents of each of which are hereby incorporated herein by reference.

[0191] Modified RNA backbones that do not include a phosphorus atom therein have backbones that are formed by short chain alkyl or cycloalkyl internucleoside linkages, mixed heteroatoms and alkyl or cycloalkyl internucleoside linkages, or one or more short chain heteroatomic or heterocyclic internucleoside linkages. These include those having morpholino linkages (formed in part from the sugar portion of a nucleoside); siloxane backbones; sulfide, sulfoxide and sulfone backbones; formacetyl and thioformacetyl backbones; methylene formacetyl and thioformacetyl backbones; alkene containing backbones; sulfamate backbones; methyleneimino and methylenehydrazino backbones; sulfonate and sulfonamide backbones; amide backbones; and others having mixed N, O, S and CH₂ component parts.

[0192] Representative U.S. patents that teach the preparation of the above oligonucleosides include, but are not limited to, U.S. Pat. Nos. 5,034,506; 5,166,315; 5,185,444; 5,214,134; 5,216,141; 5,235,033; 5,64,562; 5,264,564; 5,405,938; 5,434,257; 5,466,677; 5,470,967; 5,489,677; 5,541,307; 5,561,225; 5,596,086; 5,602,240; 5,608,046; 5,610,289; 5,618,704; 5,623,070; 5,663,312; 5,633,360; 5,677,437; and, 5,677,439, the entire contents of each of which are hereby incorporated herein by reference.

[0193] In other embodiments, suitable RNA mimetics are contemplated for use in RNAi agents, in which both the sugar and the internucleoside linkage, i.e., the backbone, of the nucleotide units are replaced with novel groups. The base units are maintained for hybridization with an appropriate nucleic acid target compound. One such oligomeric compound, an RNA mimetic that has been shown to have excellent hybridization properties, is referred to as a peptide nucleic acid (PNA). In PNA compounds, the sugar backbone of an RNA is replaced with an amide containing backbone, in particular an aminoethylglycine backbone. The nucleobases are retained and are bound directly or indirectly to aza nitrogen atoms of the amide portion of the backbone. Representative U.S. patents that teach the preparation of PNA compounds include, but are not limited to, U.S. Pat. Nos. 5,539,082; 5,714,331; and 5,719,262, the entire contents of each of which are hereby incorporated herein by reference. Additional PNA compounds suitable for use in the RNAi agents of the disclosure are described in, for example, in Nielsen et al., Science, 1991, 254, 1497-1500.

[0194] Some embodiments featured in the disclosure include RNAs with phosphorothioate backbones and oligonucleosides with heteroatom backbones, and in particular —CH₂—NH—CH₂—, —CH₂—N(CH₃)—O—CH₂— [known as a methylene (methylimino) or MMI backbone], —CH₂—O—N(CH₃)—CH₂—, —CH₂—N(CH₃)—N(CH₃)—CH₂— and —N(CH₃)—CH₂—CH₂— [wherein the native phosphodiester backbone is represented as —O—P—O—CH₂—] of the above-referenced U.S. Pat. No. 5,489,677, and the amide backbones of the above-referenced U.S. Pat. No. 5,602,240. In some embodiments, the RNAs featured herein have morpholino backbone structures of the above-referenced U.S. Pat. No. 5,034,506.

[0195] Modified RNAs can also contain one or more substituted sugar moieties. The RNAi agents, e.g., dsRNAs, featured herein can include one of the following at the 2′-position: OH; F; O-, S-, or N-alkyl; O-, S-, or N-alkenyl; O-, S- or N-alkynyl; or O-alkyl-O-alkyl, wherein the alkyl, alkenyl and alkynyl can be substituted or unsubstituted C₁ to C₁₀ alkyl or C₂ to C₁₀ alkenyl and alkynyl. Exemplary suitable modifications include O[(CH₂)ₙO]ₘCH₃, O(CH₂)·ₙOCH₃, O(CH₂)ₙNH₂, O(CH₂)ₙCH₃, O(CH₂)ₙONH₂, and O(CH₂)ₙON[(CH₂)ₙCH₃)]₂, where n and m are from 1 to about 10. In other embodiments, dsRNAs include one of the following at the 2′ position: C₁ to C₁₀ lower alkyl, substituted lower alkyl, alkaryl, aralkyl, O-alkaryl or O-aralkyl, SH, SCH₃, OCN, Cl, Br, CN, CF₃, OCF₃, SOCH₃, SO₂CH₃, ONO₂, NO₂, N₃, NH₂, heterocycloalkyl, heterocycloalkaryl, aminoalkylamino, polyalkylamino, substituted silyl, an RNA cleaving group, a reporter group, an intercalator, a group for improving the pharmacokinetic properties of an RNAi agent, or a group for improving the pharmacodynamic properties of an RNAi agent, and other substituents having similar properties. In some embodiments, the modification includes a 2′-methoxyethoxy (2′-O—CH₂CH₂OCH₃, also known as 2′-O-(2-methoxyethyl) or 2′-MOE) (Martin et al., Helv. Chim. Acta, 1995, 78: 486-504) i.e., an alkoxy-alkoxy group. Another exemplary modification is 2′-dimethylaminooxyethoxy, i.e., a O(CH₂)₂ON(CH₃)₂ group, also known as 2′-DMAOE, as described in examples herein below, and 2′-dimethylaminoethoxyethoxy (also known in the art as 2′-O-dimethylaminoethoxyethyl or 2′-DMAEOE), i.e., 2′-O—CH₂—O—CH₂—N(CH₂)₂. Further exemplary modifications include: 5′-Me-2′-F nucleotides, 5′-Me-2′-OMe nucleotides, 5′-Me-2′-deoxynucleotides, (both R and S isomers in these three families); 2′-alkoxyalkyl; and 2′-NMA (N-methylacetamide).

[0196] Other modifications include 2′-methoxy (2′-OCH₃), 2′-aminopropoxy (2′-OCH₂CH₂CH₂NH₂), 2′-O-hexadecyl, and 2′-fluoro (2′-F). Similar modifications can also be made at other positions on the RNA of an RNAi agent, particularly the 3′ position of the sugar on the 3′ terminal nucleotide or in 2′-5′ linked dsRNAs and the 5′ position of 5′ terminal nucleotide. RNAi agents can also have sugar mimetics such as cyclobutyl moieties in place of the pentofuranosyl sugar. Representative U.S. patents that teach the preparation of such modified sugar structures include, but are not limited to, U.S. Pat. Nos. 4,981,957; 5,118,800; 5,319,080; 5,359,044; 5,393,878; 5,446,137; 5,466,786; 5,514,785; 5,519,134; 5,567,811; 5,576,427; 5,591,722; 5,597,909; 5,610,300; 5,627,053; 5,639,873; 5,646,265; 5,658,873; 5,670,633; and 5,700,920, certain of which are commonly owned with the instant application. The entire contents of each of the foregoing are hereby incorporated herein by reference.

[0197] An RNAi agent of the disclosure can also include nucleobase (often referred to in the art simply as “base”) modifications or substitutions. As used herein, “unmodified” or “natural” nucleobases include the purine bases adenine (A) and guanine (G), and the pyrimidine bases thymine (T), cytosine (C) and uracil (U). Modified nucleobases include other synthetic and natural nucleobases such as 5-methylcytosine (5-me-C), 5-hydroxymethyl cytosine, xanthine, hypoxanthine, 2-aminoadenine, 6-methyl and other alkyl derivatives of adenine and guanine, 2-propyl and other alkyl derivatives of adenine and guanine, 2-thiouracil, 2-thiothymine and 2-thiocytosine, 5-halouracil and cytosine, 5-propynyl uracil and cytosine, 6-azo uracil, cytosine and thymine, 5-uracil (pseudouracil), 4-thiouracil, 8-halo, 8-amino, 8-thiol, 8-thioalkyl, 8-hydroxyl anal other 8-substituted adenines and guanines, 5-halo, particularly 5-bromo, 5-trifluoromethyl and other 5-substituted uracils and cytosines, 7-methylguanine and 7-methyladenine, 8-azaguanine and 8-azaadenine, 7-deazaguanine and 7-daazaadenine and 3-deazaguanine and 3-deazaadenine. Further nucleobases include those disclosed in U.S. Pat. No. 3,687,808, those disclosed in Modified Nucleosides in Biochemistry, Biotechnology and Medicine, Herdewijn, P. ed. Wiley-VCH, 2008; those disclosed in The Concise Encyclopedia Of Polymer Science And Engineering, pages 858-859, Kroschwitz, J. L, ed. John Wiley & Sons, 1990, these disclosed by Englisch et al., (1991) Angewandte Chemie, International Edition, 30: 613, and those disclosed by Sanghvi, Y S., Chapter 15, dsRNA Research and Applications, pages 289-302, Crooke, S. T. and Lebleu, B., Ed., CRC Press, 1993. Certain of these nucleobases are particularly useful for increasing the binding affinity of the oligomeric compounds featured in the disclosure. These include 5-substituted pyrimidines, 6-azapyrimidines and N-2, N-6 and 0-6 substituted purines, including 2-aminopropyladenine, 5-propynyluracil and 5-propynylcytosine. 5-methylcytosine substitutions have been shown to increase nucleic acid duplex stability by 0.6-1.2° C. (Sanghvi, Y. S., Crooke, S. T. and Lebleu, B., Eds., dsRNA Research and Applications, CRC Press, Boca Raton, 1993, pp. 276-278) and are exemplary base substitutions, even more particularly when combined with 2′-O-methoxyethyl sugar modifications.

[0198] Representative U.S. patents that teach the preparation of certain of the above noted modified nucleobases as well as other modified nucleobases include, but are not limited to, the above noted U.S. Pat. Nos. 3,687,808, 4,845,205; 5,130,30; 5,134,066; 5,175,273; 5,367,066; 5,432,272; 5,457,187; 5,459,255; 5,484,908; 5,502,177; 5,525,711; 5,552,540; 5,587,469; 5,594,121, 5,596,091; 5,614,617; 5,681,941; 5,750,692; 6,015,886; 6,147,200; 6,166,197; 6,222,025; 6,235,887; 6,380,368; 6,528,640; 6,639,062; 6,617,438; 7,045,610; 7,427,672; and 7,495,088, the entire contents of each of which are hereby incorporated herein by reference.

[0199] An RNAi agent of the disclosure can also be modified to include one or more locked nucleic acids (LNA). A locked nucleic acid is a nucleotide having a modified ribose moiety in which the ribose moiety comprises an extra bridge connecting the 2′ and 4′ carbons. This structure effectively “locks” the ribose in the 3′-endo structural conformation. The addition of locked nucleic acids to siRNAs has been shown to increase siRNA stability in serum, and to reduce off-target effects (Elmen, J. et al., (2005) Nucleic Acids Research 33(1): 439-447; Mook, O R. et al., (2007) Mol Canc Ther 6(3): 833-843; Grunweller, A. et al., (2003) Nucleic Acids Research 31(12): 3185-3193).

[0200] An RNAi agent of the disclosure can also be modified to include one or more bicyclic sugar moities. A “bicyclic sugar” is a furanosyl ring modified by the bridging of two atoms. A “bicyclic nucleoside” (“BNA”) is a nucleoside having a sugar moiety comprising a bridge connecting two carbon atoms of the sugar ring, thereby forming a bicyclic ring system. In certain embodiments, the bridge connects the 4′-carbon and the 2′-carbon of the sugar ring. Thus, in some embodiments an agent of the disclosure may include one or more locked nucleic acids (LNA). A locked nucleic acid is a nucleotide having a modified ribose moiety in which the ribose moiety comprises an extra bridge connecting the 2′ and 4′ carbons. In other words, an LNA is a nucleotide comprising a bicyclic sugar moiety comprising a 4′-CH₂—O-2′ bridge. This structure effectively “locks” the ribose in the 3′-endo structural conformation. The addition of locked nucleic acids to siRNAs has been shown to increase siRNA stability in serum, and to reduce off-target effects (Elmen, J. et al., (2005) Nucleic Acids Research 33(1): 439-447; Mook, O R. et al., (2007) Mol Canc Ther 6(3): 833-843; Grunweller, A. et al., (2003) Nucleic Acids Research 31(12): 3185-3193). Examples of bicyclic nucleosides for use in the polynucleotides of the disclosure include without limitation nucleosides comprising a bridge between the 4′ and the 2′ ribosyl ring atoms. In certain embodiments, the antisense polynucleotide agents of the disclosure include one or more bicyclic nucleosides comprising a 4′ to 2′ bridge. Examples of such 4′ to 2′ bridged bicyclic nucleosides, include but are not limited to 4′-(CH2)-O-2′ (LNA); 4′-(CH2)S-2′; 4′-(CH2)2-O-2′ (ENA); 4′-CH(CH3)-O-2′ (also referred to as “constrained ethyl” or “cEt”) and 4′-CH(CH2OCH3)-O-2′ (and analogs thereof, see, e.g., U.S. Pat. No. 7,399,845); 4′-C(CH3)(CH3)-O-2′ (and analogs thereof; see e.g., U.S. Pat. No. 8,278,283); 4′-CH2 N(OCH3)-2′ (and analogs thereof; see e.g., U.S. Pat. No. 8,278,425); 4′-CH2-O—N(CH3)-2′ (see, e.g., U.S. Patent Publication No. 2004/0171570); 4′-CH2-N(R)—O-2′, wherein R is H, C1-C12 alkyl, or a protecting group (see, e.g., U.S. Pat. No. 7,427,672); 4′-CH2-C(H)(CH3)-2′ (see, e.g., Chattopadhyaya et al., J. Org. Chem., 2009, 74, 118-134); and 4′-CH2-C(═CH2)-2′ (and analogs thereof, see, e.g., U.S. Pat. No. 8,278,426). The entire contents of each of the foregoing are hereby incorporated herein by reference.

[0201] Additional representative US patents and US Patent Publications that teach the preparation of locked nucleic acid nucleotides include, but are not limited to, the following: U.S. Pat. Nos. 6,268,490; 6,525,191; 6,670,461; 6,770,748; 6,794,499; 6,998,484; 7,053,207; 7,034,133; 7,084,125; 7,399,845; 7,427,672; 7,569,686; 7,741,457; 8,022,193; 8,030,467; 8,278,425; 8,278,426; 8,278,283; US 2008/0039618; and US 2009/0012281, the entire contents of each of which are hereby incorporated herein by reference.

[0202] Any of the foregoing bicyclic nucleosides can be prepared having one or more stereochemical sugar configurations including for example α-L-ribofuranose and 3-D-ribofuranose (see WO 99/14226).

[0203] An RNAi agent of the disclosure can also be modified to include one or more constrained ethyl nucleotides. As used herein, a “constrained ethyl nucleotide” or “cEt” is a locked nucleic acid comprising a bicyclic sugar moiety comprising a 4′-CH(CH₃)—O-2′ bridge. In one embodiment, a constrained ethyl nucleotide is in the S conformation referred to herein as “S-cEt.”

[0204] An RNAi agent of the disclosure may also include one or more “conformationally restricted nucleotides” (“CRN”). CRN are nucleotide analogs with a linker connecting the C2′ and C4′ carbons of ribose or the C3′ and C5′ carbons of ribose. CRN lock the ribose ring into a stable conformation and increase the hybridization affinity to mRNA. The linker is of sufficient length to place the oxygen in an optimal position for stability and affinity resulting in less ribose ring puckering.

[0205] Representative publications that teach the preparation of certain of the above noted CRN include, but are not limited to, US 2013/0190383; and WO 2013/036868, the entire contents of each of which are hereby incorporated herein by reference.

[0206] In some embodiments, an RNAi agent of the disclosure comprises one or more monomers that are UNA (unlocked nucleic acid) nucleotides. UNA is unlocked acyclic nucleic acid, wherein any of the bonds of the sugar has been removed, forming an unlocked “sugar” residue. In one example, UNA also encompasses monomer with bonds between C1′-C4′ have been removed (i.e. the covalent carbon-oxygen-carbon bond between the C1′ and C4′ carbons). In another example, the C2′-C3′ bond (i.e. the covalent carbon-carbon bond between the C2′ and C3′ carbons) of the sugar has been removed (see Nuc. Acids Symp. Series, 52, 133-134 (2008) and Fluiter et al., Mol. Biosyst., 2009, 10, 1039 hereby incorporated by reference).

[0207] Representative U.S. publications that teach the preparation of UNA include, but are not limited to, U.S. Pat. No. 8,314,227; and U.S. Patent Publication Nos. 2013/0096289; 2013/0011922; and 2011/0313020, the entire contents of each of which are hereby incorporated herein by reference.

[0208] Potentially stabilizing modifications to the ends of RNA molecules can include N-(acetylaminocaproyl)-4-hydroxyprolinol (Hyp-C6-NHAc), N-(caproyl-4-hydroxyprolinol (Hyp-C6), N-(acetyl-4-hydroxyprolinol (Hyp-NHAc), thymidine-2′-O-deoxythymidine (ether), N-(aminocaproyl)-4-hydroxyprolinol (Hyp-C6-amino), 2-docosanoyl-uridine-3″-phosphate, inverted base dT(idT) and others. Disclosure of this modification can be found in WO 2011/005861.

[0209] Other modifications of an RNAi agent of the disclosure include a 5′ phosphate or 5′ phosphate mimic, e.g., a 5′-terminal phosphate or phosphate mimic on the antisense strand of an RNAi agent. Suitable phosphate mimics are disclosed in, for example US 2012/0157511, the entire contents of which are incorporated herein by reference.

A. Modified RNAi agents Comprising Motifs of the Disclosure

[0210] In certain aspects of the disclosure, the double-stranded RNAi agents of the disclosure include agents with chemical modifications as disclosed, for example, in WO 2013/075035, the entire contents of which are incorporated herein by reference. As shown herein and in WO 2013/075035, a superior result may be obtained by introducing one or more motifs of three identical modifications on three consecutive nucleotides into a sense strand or antisense strand of an RNAi agent, particularly at or near the cleavage site. In some embodiments, the sense strand and antisense strand of the RNAi agent may otherwise be completely modified. The introduction of these motifs interrupts the modification pattern, if present, of the sense or antisense strand. The RNAi agent may be optionally conjugated with a lipophilic ligand, e.g., a C16 ligand, for instance on the sense strand. The RNAi agent may be optionally modified with a (S)-glycol nucleic acid (GNA) modification, for instance on one or more residues of the antisense strand. The resulting RNAi agents present superior gene silencing activity.

[0211] Accordingly, the disclosure provides double stranded RNAi agents capable of inhibiting the expression of a target gene (i.e., an APP gene) in vivo. The RNAi agent comprises a sense strand and an antisense strand. Each strand of the RNAi agent may be 15-30 nucleotides in length. For example, each strand may be 16-30 nucleotides in length, 17-30 nucleotides in length, 25-30 nucleotides in length, 27-30 nucleotides in length, 17-23 nucleotides in length, 17-21 nucleotides in length, 17-19 nucleotides in length, 19-25 nucleotides in length, 19-23 nucleotides in length, 19-21 nucleotides in length, 21-25 nucleotides in length, or 21-23 nucleotides in length. In certain embodiments, each strand is 19-23 nucleotides in length.

[0212] The sense strand and antisense strand typically form a duplex double stranded RNA (“dsRNA”), also referred to herein as an “RNAi agent.” The duplex region of an RNAi agent may be 15-30 nucleotide pairs in length. For example, the duplex region can be 16-30 nucleotide pairs in length, 17-30 nucleotide pairs in length, 27-30 nucleotide pairs in length, 17-23 nucleotide pairs in length, 17-21 nucleotide pairs in length, 17-19 nucleotide pairs in length, 19-25 nucleotide pairs in length, 19-23 nucleotide pairs in length, 19-21 nucleotide pairs in length, 21-25 nucleotide pairs in length, or 21-23 nucleotide pairs in length. In another example, the duplex region is selected from 15, 16, 17, 18, 19, 20, 21, 22, 23, 24, 25, 26, and 27 nucleotides in length. In preferred embodiments, the duplex region is 19-21 nucleotide pairs in length.

[0213] In one embodiment, the RNAi agent may contain one or more overhang regions or capping groups at the 3′-end, 5′-end, or both ends of one or both strands. The overhang can be 1-6 nucleotides in length, for instance 2-6 nucleotides in length, 1-5 nucleotides in length, 2-5 nucleotides in length, 1-4 nucleotides in length, 2-4 nucleotides in length, 1-3 nucleotides in length, 2-3 nucleotides in length, or 1-2 nucleotides in length. In preferred embodiments, the nucleotide overhang region is 2 nucleotides in length. The overhangs can be the result of one strand being longer than the other, or the result of two strands of the same length being staggered. The overhang can form a mismatch with the target mRNA or it can be complementary to the gene sequences being targeted or can be another sequence. The first and second strands can also be joined, e.g., by additional bases to form a hairpin, or by other non-base linkers.

[0214] In one embodiment, the nucleotides in the overhang region of the RNAi agent can each independently be a modified or unmodified nucleotide including, but no limited to 2′-sugar modified, such as, 2′-F, 2′-O-methyl, thymidine (T), and any combinations thereof.

[0215] For example, TT can be an overhang sequence for either end on either strand. The overhang can form a mismatch with the target mRNA or it can be complementary to the gene sequences being targeted or can be another sequence.

[0216] The 5′- or 3′-overhangs at the sense strand, antisense strand or both strands of the RNAi agent may be phosphorylated. In some embodiments, the overhang region(s) contains two nucleotides having a phosphorothioate between the two nucleotides, where the two nucleotides can be the same or different. In one embodiment, the overhang is present at the 3′-end of the sense strand, antisense strand, or both strands. In one embodiment, this 3′-overhang is present in the antisense strand. In one embodiment, this 3′-overhang is present in the sense strand.

[0217] The RNAi agent may contain only a single overhang, which can strengthen the interference activity of the RNAi, without affecting its overall stability. For example, the single-stranded overhang may be located at the 3′-terminal end of the sense strand or, alternatively, at the 3′-terminal end of the antisense strand. The RNAi may also have a blunt end, located at the 5′-end of the antisense strand (or the 3′-end of the sense strand) or vice versa. Generally, the antisense strand of the RNAi has a nucleotide overhang at the 3′-end, and the 5′-end is blunt. While not wishing to be bound by theory, the asymmetric blunt end at the 5′-end of the antisense strand and 3′-end overhang of the antisense strand favor the guide strand loading into RISC process.

[0218] In one embodiment, the RNAi agent is a double ended bluntmer of 19 nucleotides in length, wherein the sense strand contains at least one motif of three 2′-F modifications on three consecutive nucleotides at positions 7, 8, 9 from the 5′end. The antisense strand contains at least one motif of three 2′-O-methyl modifications on three consecutive nucleotides at positions 11, 12, 13 from the 5′end.

[0219] In another embodiment, the RNAi agent is a double ended bluntmer of 20 nucleotides in length, wherein the sense strand contains at least one motif of three 2′-F modifications on three consecutive nucleotides at positions 8, 9, 10 from the 5′end. The antisense strand contains at least one motif of three 2′-O-methyl modifications on three consecutive nucleotides at positions 11, 12, 13 from the 5′end.

[0220] In yet another embodiment, the RNAi agent is a double ended bluntmer of 21 nucleotides in length, wherein the sense strand contains at least one motif of three 2′-F modifications on three consecutive nucleotides at positions 9, 10, 11 from the 5′end. The antisense strand contains at least one motif of three 2′-O-methyl modifications on three consecutive nucleotides at positions 11, 12, 13 from the 5′end.

[0221] In one embodiment, the RNAi agent comprises a 21 nucleotide sense strand and a 23 nucleotide antisense strand, wherein the sense strand contains at least one motif of three 2′-F modifications on three consecutive nucleotides at positions 9, 10, 11 from the 5′end; the antisense strand contains at least one motif of three 2′-O-methyl modifications on three consecutive nucleotides at positions 11, 12, 13 from the 5′end, wherein one end of the RNAi agent is blunt, while the other end comprises a 2 nucleotide overhang. Optionally, the 2 nucleotide overhang is at the 3′-end of the antisense strand. When the 2 nucleotide overhang is at the 3′-end of the antisense strand, there may be two phosphorothioate internucleotide linkages between the terminal three nucleotides, wherein two of the three nucleotides are the overhang nucleotides, and the third nucleotide is a paired nucleotide next to the overhang nucleotide. In one embodiment, the RNAi agent additionally has two phosphorothioate internucleotide linkages between the terminal three nucleotides at both the 5′-end of the sense strand and at the 5′-end of the antisense strand. In one embodiment, every nucleotide in the sense strand and the antisense strand of the RNAi agent, including the nucleotides that are part of the motifs are modified nucleotides. In one embodiment each residue is independently modified with a 2′-O-methyl or 3′-fluoro, e.g., in an alternating motif. Optionally, the RNAi agent further comprises a ligand (e.g., a lipophilic ligand, optionally a C16 ligand).

[0222] In one embodiment, the RNAi agent comprises a sense and an antisense strand, wherein the sense strand is 25-30 nucleotide residues in length, wherein starting from the 5′ terminal nucleotide (position 1) positions 1 to 23 of the first strand comprise at least 8 ribonucleotides; the antisense strand is 36-66 nucleotide residues in length and, starting from the 3′ terminal nucleotide, comprises at least 8 ribonucleotides in the positions paired with positions 1-23 of sense strand to form a duplex; wherein at least the 3′ terminal nucleotide of antisense strand is unpaired with sense strand, and up to 6 consecutive 3′ terminal nucleotides are unpaired with sense strand, thereby forming a 3′ single stranded overhang of 1-6 nucleotides; wherein the 5′ terminus of antisense strand comprises from 10-30 consecutive nucleotides which are unpaired with sense strand, thereby forming a 10-30 nucleotide single stranded 5′ overhang; wherein at least the sense strand 5′ terminal and 3′ terminal nucleotides are base paired with nucleotides of antisense strand when sense and antisense strands are aligned for maximum complementarity, thereby forming a substantially duplexed region between sense and antisense strands; and antisense strand is sufficiently complementary to a target RNA along at least 19 ribonucleotides of antisense strand length to reduce target gene expression when the double stranded nucleic acid is introduced into a mammalian cell; and wherein the sense strand contains at least one motif of three 2′-F modifications on three consecutive nucleotides, where at least one of the motifs occurs at or near the cleavage site. The antisense strand contains at least one motif of three 2′-O-methyl modifications on three consecutive nucleotides at or near the cleavage site.

[0223] In one embodiment, the RNAi agent comprises sense and antisense strands, wherein the RNAi agent comprises a first strand having a length which is at least 25 and at most 29 nucleotides and a second strand having a length which is at most 30 nucleotides with at least one motif of three 2′-O-methyl modifications on three consecutive nucleotides at position 11, 12, 13 from the 5′ end; wherein the 3′ end of the first strand and the 5′ end of the second strand form a blunt end and the second strand is 1-4 nucleotides longer at its 3′ end than the first strand, wherein the duplex region which is at least 25 nucleotides in length, and the second strand is sufficiently complementary to a target mRNA along at least 19 nucleotide of the second strand length to reduce target gene expression when the RNAi agent is introduced into a mammalian cell, and wherein dicer cleavage of the RNAi agent preferentially results in an siRNA comprising the 3′ end of the second strand, thereby reducing expression of the target gene in the mammal. Optionally, the RNAi agent further comprises a ligand.

[0224] In one embodiment, the sense strand of the RNAi agent contains at least one motif of three identical modifications on three consecutive nucleotides, where one of the motifs occurs at the cleavage site in the sense strand.

[0225] In one embodiment, the antisense strand of the RNAi agent can also contain at least one motif of three identical modifications on three consecutive nucleotides, where one of the motifs occurs at or near the cleavage site in the antisense strand.

[0226] For an RNAi agent having a duplex region of 17-23 nucleotide in length, the cleavage site of the antisense strand is typically around the 10, 11 and 12 positions from the 5′-end. Thus the motifs of three identical modifications may occur at the 9, 10, 11 positions; 10, 11, 12 positions; 11, 12, 13 positions; 12, 13, 14 positions; or 13, 14, 15 positions of the antisense strand, the count starting from the 1^{st} nucleotide from the 5′-end of the antisense strand, or, the count starting from the 1^{st} paired nucleotide within the duplex region from the 5′-end of the antisense strand. The cleavage site in the antisense strand may also change according to the length of the duplex region of the RNAi from the 5′-end.

[0227] The sense strand of the RNAi agent may contain at least one motif of three identical modifications on three consecutive nucleotides at the cleavage site of the strand; and the antisense strand may have at least one motif of three identical modifications on three consecutive nucleotides at or near the cleavage site of the strand. When the sense strand and the antisense strand form a dsRNA duplex, the sense strand and the antisense strand can be so aligned that one motif of the three nucleotides on the sense strand and one motif of the three nucleotides on the antisense strand have at least one nucleotide overlap, i.e., at least one of the three nucleotides of the motif in the sense strand forms a base pair with at least one of the three nucleotides of the motif in the antisense strand. Alternatively, at least two nucleotides may overlap, or all three nucleotides may overlap.

[0228] In one embodiment, the sense strand of the RNAi agent may contain more than one motif of three identical modifications on three consecutive nucleotides. The first motif may occur at or near the cleavage site of the strand and the other motifs may be a wing modification. The term “wing modification” herein refers to a motif occurring at another portion of the strand that is separated from the motif at or near the cleavage site of the same strand. The wing modification is either adjacent to the first motif or is separated by at least one or more nucleotides. When the motifs are immediately adjacent to each other, the chemistry of the motifs are distinct from each other; and when the motifs are separated by one or more nucleotide, the chemistries can be the same or different. Two or more wing modifications may be present. For instance, when two wing modifications are present, each wing modification may occur at one end relative to the first motif which is at or near cleavage site or on either side of the lead motif.

[0229] Like the sense strand, the antisense strand of the RNAi agent may contain more than one motif of three identical modifications on three consecutive nucleotides, with at least one of the motifs occurring at or near the cleavage site of the strand. This antisense strand may also contain one or more wing modifications in an alignment similar to the wing modifications that may be present on the sense strand.

[0230] In one embodiment, the wing modification on the sense strand or antisense strand of the RNAi agent typically does not include the first one or two terminal nucleotides at the 3′-end, 5′-end or both ends of the strand.

[0231] In another embodiment, the wing modification on the sense strand or antisense strand of the RNAi agent typically does not include the first one or two paired nucleotides within the duplex region at the 3′-end, 5′-end or both ends of the strand.

[0232] When the sense strand and the antisense strand of the RNAi agent each contain at least one wing modification, the wing modifications may fall on the same end of the duplex region, and have an overlap of one, two or three nucleotides.

[0233] When the sense strand and the antisense strand of the RNAi agent each contain at least two wing modifications, the sense strand and the antisense strand can be so aligned that two modifications each from one strand fall on one end of the duplex region, having an overlap of one, two or three nucleotides; two modifications each from one strand fall on the other end of the duplex region, having an overlap of one, two or three nucleotides; two modifications one strand fall on each side of the lead motif, having an overlap of one, two, or three nucleotides in the duplex region.

[0234] In one embodiment, the RNAi agent comprises mismatch(es) with the target, within the duplex, or combinations thereof. The mismatch may occur in the overhang region or the duplex region. The base pair may be ranked on the basis of their propensity to promote dissociation or melting (e.g., on the free energy of association or dissociation of a particular pairing, the simplest approach is to examine the pairs on an individual pair basis, though next neighbor or similar analysis can also be used). In terms of promoting dissociation: A:U is preferred over G:C; G:U is preferred over G:C; and I:C (I=inosine) is preferred over G:C. Mismatches, e.g., non-canonical or other than canonical pairings (as described elsewhere herein) are preferred over canonical (A:T, A:U, G:C) pairings; and pairings which include a universal base are preferred over canonical pairings.

[0235] In one embodiment, the RNAi agent comprises at least one of the first 1, 2, 3, 4, or 5 base pairs within the duplex regions from the 5′-end of the antisense strand independently selected from the group of: A:U, G:U, I:C, and mismatched pairs, e.g., non-canonical or other than canonical pairings or pairings which include a universal base, to promote the dissociation of the antisense strand at the 5′-end of the duplex.

[0236] In one embodiment, the nucleotide at the 1 position within the duplex region from the 5′-end in the antisense strand is selected from the group consisting of A, dA, dU, U, and dT. Alternatively, at least one of the first 1, 2 or 3 base pair within the duplex region from the 5′-end of the antisense strand is an AU base pair. For example, the first base pair within the duplex region from the 5′-end of the antisense strand is an AU base pair.

[0237] In another embodiment, the nucleotide at the 3′-end of the sense strand is deoxy-thymine (dT). In another embodiment, the nucleotide at the 3′-end of the antisense strand is deoxy-thymine (dT). In one embodiment, there is a short sequence of deoxy-thymine nucleotides, for example, two dT nucleotides on the 3′-end of the sense or antisense strand.

[0238] In one embodiment, the sense strand sequence may be represented by formula (I):

(I)
5′ nₚ-Nₐ-(X X X )ᵢ-N_{b}-Y Y Y-N_{b}-(Z Z Z )ⱼ-Nₐ-n_{q} 3′

[0239] wherein:
[0240] i and j are each independently 0 or 1;
[0241] p and q are each independently 0-6;
[0242] each Nₐ independently represents an oligonucleotide sequence comprising 0-25 modified nucleotides, each sequence comprising at least two differently modified nucleotides;
[0243] each N_{b} independently represents an oligonucleotide sequence comprising 0-10 modified nucleotides;
[0244] each nₚ and n_{q} independently represent an overhang nucleotide;
[0245] wherein N_{b} and Y do not have the same modification; and
[0246] XXX, YYY and ZZZ each independently represent one motif of three identical modifications on three consecutive nucleotides. Optionally YYY is all 2′-F modified nucleotides.

[0247] In one embodiment, the Nₐ or N_{b} comprise modifications of alternating pattern.

[0248] In one embodiment, the YYY motif occurs at or near the cleavage site of the sense strand. For example, when the RNAi agent has a duplex region of 17-23 nucleotides in length, the YYY motif can occur at or the vicinity of the cleavage site (e.g.: can occur at positions 6, 7, 8, 7, 8, 9, 8, 9, 10, 9, 10, 11, 10, 11, 12 or 11, 12, 13) of—the sense strand, the count starting from the 1^{st} nucleotide, from the 5′-end; or optionally, the count starting at the 1^{st} paired nucleotide within the duplex region, from the 5′-end.

[0249] In one embodiment, i is 1 and j is 0, or i is 0 and j is 1, or both i and j are 1. The sense strand can therefore be represented by the following formulas:

(Ib)
5′ nₚ-Nₐ-YYY-N_{b}-ZZZ-Nₐ-n_{q} 3′;
(Ic)
5′ nₚ-Nₐ-XXX-N_{b}-YYY-Nₐ-n_{q} 3′;
or
(Id)
5′ nₚ-Nₐ-XXX-N_{b}-YYY-N_{b}-ZZZ-Nₐ-n_{q} 3′.

[0250] When the sense strand is represented by formula (Ib), N_{b} represents an oligonucleotide sequence comprising 0-10, 0-7, 0-5, 0-4, 0-2 or 0 modified nucleotides.

[0251] Each Nₐ independently can represent an oligonucleotide sequence comprising 2-20, 2-15, or 2-10 modified nucleotides.

[0252] When the sense strand is represented as formula (Ic), N_{b} represents an oligonucleotide sequence comprising 0-10, 0-7, 0-10, 0-7, 0-5, 0-4, 0-2 or 0 modified nucleotides. Each Nₐ can independently represent an oligonucleotide sequence comprising 2-20, 2-15, or 2-10 modified nucleotides.

[0253] When the sense strand is represented as formula (Id), each N_{b} independently represents an oligonucleotide sequence comprising 0-10, 0-7, 0-5, 0-4, 0-2 or 0 modified nucleotides. Optionally, N_{b} is 0, 1, 2, 3, 4, 5 or 6. Each Nₐ can independently represent an oligonucleotide sequence comprising 2-20, 2-15, or 2-10 modified nucleotides.

[0254] Each of X, Y and Z may be the same or different from each other.

[0255] In other embodiments, i is 0 and j is 0, and the sense strand may be represented by the formula:

(Ia)
5′ nₚ-Nₐ-YYY-Nₐ-n_{q} 3′.

[0256] When the sense strand is represented by formula (Ia), each Nₐ independently can represent an oligonucleotide sequence comprising 2-20, 2-15, or 2-10 modified nucleotides.

[0257] In one embodiment, the antisense strand sequence of the RNAi may be represented by formula (II):

(II)
5′ n_{q′}-Nₐ′-(Z′Z′Z′)ₖ-N_{b}′-Y′Y′Y′-N_{b}′-
(X′X′X′)ₗ-N′ₐ-nₚ′ 3′

[0258] wherein:
[0259] k and l are each independently 0 or 1;
[0260] p′ and q′ are each independently 0-6;
[0261] each Nₐ′ independently represents an oligonucleotide sequence comprising 0-25 modified nucleotides, each sequence comprising at least two differently modified nucleotides;
[0262] each N_{b}′ independently represents an oligonucleotide sequence comprising 0-10 modified nucleotides;
[0263] each nₚ′ and n_{q}′ independently represent an overhang nucleotide;
[0264] wherein N_{b}′ and Y′ do not have the same modification;
[0265] and
[0266] X′X′X′, Y′Y′Y′ and Z′Z′Z′ each independently represent one motif of three identical modifications on three consecutive nucleotides.

[0267] In one embodiment, the Nₐ′ or N_{b}′ comprise modifications of alternating pattern.

[0268] The Y′Y′Y′ motif occurs at or near the cleavage site of the antisense strand. For example, when the RNAi agent has a duplex region of 17-23 nucleotide in length, the Y′Y′Y′ motif can occur at positions 9, 10, 11; 10, 11, 12; 11, 12, 13; 12, 13, 14; or 13, 14, 15 of the antisense strand, with the count starting from the 1^{st} nucleotide, from the 5′-end; or optionally, the count starting at the 1^{st} paired nucleotide within the duplex region, from the 5′-end. Optionally, the Y′Y′Y′ motif occurs at positions 11, 12, 13.

[0269] In one embodiment, Y′Y′Y′ motif is all 2′-OMe modified nucleotides.

[0270] In one embodiment, k is 1 and 1 is 0, or k is 0 and 1 is 1, or both k and 1 are 1.

[0271] The antisense strand can therefore be represented by the following formulas:

(IIb)
5′ n_{q′}-Nₐ′-Z′Z′Z′-N_{b}′-Y′Y′Y′-Nₐ′-nₚ′ 3′;
(IIc)
5′ n_{q′}-Nₐ′-Y′Y′Y′-N_{b}′-X′X′X′-n_{p′} 3′;
or
(IId)
5′ n_{q′}-Nₐ′-Z′Z′Z′-N_{b}′-Y′Y′Y′-N_{b}′-X′X′X′-Nₐ′-n_{p′} 3′.

[0272] When the antisense strand is represented by formula (IIb), N_{b} represents an oligonucleotide sequence comprising 0-10, 0-7, 0-10, 0-7, 0-5, 0-4, 0-2 or 0 modified nucleotides. Each Nₐ′ independently represents an oligonucleotide sequence comprising 2-20, 2-15, or 2-10 modified nucleotides.

[0273] When the antisense strand is represented as formula (IIc), N_{b}′ represents an oligonucleotide sequence comprising 0-10, 0-7, 0-10, 0-7, 0-5, 0-4, 0-2 or 0 modified nucleotides. Each Nₐ′ independently represents an oligonucleotide sequence comprising 2-20, 2-15, or 2-10 modified nucleotides.

[0274] When the antisense strand is represented as formula (IId), each N_{b}′ independently represents an oligonucleotide sequence comprising 0-10, 0-7, 0-10, 0-7, 0-5, 0-4, 0-2 or 0 modified nucleotides. Each Nₐ′ independently represents an oligonucleotide sequence comprising 2-20, 2-15, or 2-10 modified nucleotides. Optionally, N_{b} is 0, 1, 2, 3, 4, 5 or 6.

[0275] In other embodiments, k is 0 and 1 is 0 and the antisense strand may be represented by the formula:

(Ia)
5′ n_{p′}-Nₐ′-Y′Y′Y′-N_{a′}-n_{q′} 3′.

[0276] When the antisense strand is represented as formula (IIa), each Nₐ′ independently represents an oligonucleotide sequence comprising 2-20, 2-15, or 2-10 modified nucleotides.

[0277] Each of X′, Y′ and Z′ may be the same or different from each other.

[0278] Each nucleotide of the sense strand and antisense strand may be independently modified with LNA, HNA, CeNA, 2′-methoxyethyl, 2′-O-methyl, 2′-O-allyl, 2′-C-allyl, 2′-hydroxyl, or 2′-fluoro. For example, each nucleotide of the sense strand and antisense strand is independently modified with 2′-O-methyl or 2′-fluoro. Each X, Y, Z, X′, Y′ and Z′, in particular, may represent a 2′-O-methyl modification or a 2′-fluoro modification.

[0279] In one embodiment, the sense strand of the RNAi agent may contain YYY motif occurring at 9, 10 and 11 positions of the strand when the duplex region is 21 nt, the count starting from the 1^{st} nucleotide from the 5′-end, or optionally, the count starting at the 1^{st} paired nucleotide within the duplex region, from the 5′-end; and Y represents 2′-F modification. The sense strand may additionally contain XXX motif or ZZZ motifs as wing modifications at the opposite end of the duplex region; and XXX and ZZZ each independently represents a 2′-OMe modification or 2′-F modification.

[0280] In one embodiment the antisense strand may contain Y′Y′Y′ motif occurring at positions 11, 12, 13 of the strand, the count starting from the 1^{st} nucleotide from the 5′-end, or optionally, the count starting at the 1^{st} paired nucleotide within the duplex region, from the 5′-end; and Y′ represents 2′-O-methyl modification. The antisense strand may additionally contain X′X′X′ motif or Z′Z′Z′ motifs as wing modifications at the opposite end of the duplex region; and X′X′X′ and Z′Z′Z′ each independently represents a 2′-OMe modification or 2′-F modification.

[0281] The sense strand represented by any one of the above formulas (Ia), (Ib), (Ic), and (Id) forms a duplex with an antisense strand being represented by any one of formulas (IIa), (IIb), (IIc), and (IId), respectively.

[0282] Accordingly, the RNAi agents for use in the methods of the disclosure may comprise a sense strand and an antisense strand, each strand having 14 to 30 nucleotides, the RNAi duplex represented by formula (III):

(III)
sense:
5′ nₚ-Nₐ-(X X X)ᵢ-N_{b}-Y Y Y-N_{b}-(ZZ Z)ⱼ-Nₐ-n_{q} 3′
antisense:
3′ nₚ′-Nₐ′-(X′X′X′)ₖ-N_{b}′-Y′Y′Y′-N_{b}′-
(Z′Z′Z′)ₗ-Nₐ′-n_{q}′ 5′

[0283] wherein:
[0284] i, j, k, and 1 are each independently 0 or 1;
[0285] p, p′, q, and q′ are each independently 0-6;
[0286] each Nₐ and Nₐ′ independently represents an oligonucleotide sequence comprising 0-25 modified nucleotides, each sequence comprising at least two differently modified nucleotides;
[0287] each N_{b} and N_{b}′ independently represents an oligonucleotide sequence comprising 0-10 modified nucleotides;
[0288] wherein
[0289] each nₚ′, nₚ, n_{q}′, and n_{q}, each of which may or may not be present, independently represents an overhang nucleotide; and
[0290] XXX, YYY, ZZZ, X′X′X′, Y′Y′Y′, and Z′Z′Z′ each independently represent one motif of three identical modifications on three consecutive nucleotides.

[0291] In one embodiment, i is 0 and j is 0; or i is 1 and j is 0; or i is 0 and j is 1; or both i and j are 0; or both i and j are 1. In another embodiment, k is 0 and 1 is 0; or k is 1 and 1 is 0; k is 0 and 1 is 1; or both k and 1 are 0; or both k and 1 are 1.

[0292] Exemplary combinations of the sense strand and antisense strand forming an RNAi duplex include the formulas below:

(IIIa)
5′ nₚ-Nₐ-Y Y Y-Nₐ-n_{q} 3′
3′ nₚ′-Nₐ′-Y′Y′Y′-Nₐ′ n_{q}′ 5′
(IIIb)
5′ nₚ-Nₐ-Y Y Y-N_{b}-ZZZ-Nₐ-n_{q} 3′
3′ nₚ′-Nₐ′-Y′Y′Y′-N_{b}′-Z′Z′Z′-Nₐ′ n_{q}′ 5′
(IIIc)
5′ nₚ-Nₐ-X X X-N_{b}-Y Y Y-Nₐ-n_{q} 3′
3′ nₚ′-Nₐ′-X′X′X′-N_{b}-Y′Y′Y′-Nₐ′-n_{q}′ 5′
(IIId)
5′ nₚ-Nₐ-X X X-N_{b}-Y Y Y-N_{b}-ZZZ-Nₐ-n_{q} 3′
3′ nₚ′-Nₐ′-X′X′X′-N_{b}′-Y′Y′Y′-N_{b}′-Z′Z′Z′-Nₐ-n_{q}′ 5′

[0293] When the RNAi agent is represented by formula (IIIa), each Nₐ independently represents an oligonucleotide sequence comprising 2-20, 2-15, or 2-10 modified nucleotides.

[0294] When the RNAi agent is represented by formula (IIIb), each N_{b} independently represents an oligonucleotide sequence comprising 1-10, 1-7, 1-5 or 1-4 modified nucleotides. Each Nₐ independently represents an oligonucleotide sequence comprising 2-20, 2-15, or 2-10 modified nucleotides.

[0295] When the RNAi agent is represented as formula (IIIc), each N_{b}, N_{b}′ independently represents an oligonucleotide sequence comprising 0-10, 0-7, 0-10, 0-7, 0-5, 0-4, 0-2 or 0 modified nucleotides. Each Nₐ independently represents an oligonucleotide sequence comprising 2-20, 2-15, or 2-10 modified nucleotides.

[0296] When the RNAi agent is represented as formula (IIId), each N_{b}, N_{b}′ independently represents an oligonucleotide sequence comprising 0-10, 0-7, 0-10, 0-7, 0-5, 0-4, 0-2 or 0 modified nucleotides. Each Nₐ, Nₐ′ independently represents an oligonucleotide sequence comprising 2-20, 2-15, or 2-10 modified nucleotides. Each of Nₐ, Nₐ′, N_{b} and N_{b}′ independently comprises modifications of alternating pattern.

[0297] In one embodiment, when the RNAi agent is represented by formula (IIId), the Nₐ modifications are 2′-O-methyl or 2′-fluoro modifications. In another embodiment, when the RNAi agent is represented by formula (IIId), the Nₐ modifications are 2′-O-methyl or 2′-fluoro modifications and nₚ′>0 and at least one nₚ′ is linked to a neighboring nucleotide a via phosphorothioate linkage. In yet another embodiment, when the RNAi agent is represented by formula (IIId), the Nₐ modifications are 2′-O-methyl or 2′-fluoro modifications, nₚ′>0 and at least one nₚ′ is linked to a neighboring nucleotide via phosphorothioate linkage, and the sense strand is conjugated to one or more C16 (or related) moieties attached through a bivalent or trivalent branched linker (described below). In another embodiment, when the RNAi agent is represented by formula (IIId), the Nₐ modifications are 2′-O-methyl or 2′-fluoro modifications, nₚ′>0 and at least one nₚ′ is linked to a neighboring nucleotide via phosphorothioate linkage, the sense strand comprises at least one phosphorothioate linkage, and the sense strand is conjugated to one or more lipophilic, e.g., C16 (or related) moieties, optionally attached through a bivalent or trivalent branched linker.

[0298] In one embodiment, when the RNAi agent is represented by formula (IIIa), the Nₐ modifications are 2′-O-methyl or 2′-fluoro modifications, nₚ′>0 and at least one nₚ′ is linked to a neighboring nucleotide via phosphorothioate linkage, the sense strand comprises at least one phosphorothioate linkage, and the sense strand is conjugated to one or more lipophilic, e.g., C16 (or related) moieties attached through a bivalent or trivalent branched linker.

[0299] In one embodiment, the RNAi agent is a multimer containing at least two duplexes represented by formula (III), (IIIa), (IIIb), (IIIc), and (IIId), wherein the duplexes are connected by a linker. The linker can be cleavable or non-cleavable. Optionally, the multimer further comprises a ligand. Each of the duplexes can target the same gene or two different genes; or each of the duplexes can target same gene at two different target sites.

[0300] In one embodiment, the RNAi agent is a multimer containing three, four, five, six or more duplexes represented by formula (III), (IIIa), (IIIb), (IIIc), and (IIId), wherein the duplexes are connected by a linker. The linker can be cleavable or non-cleavable. Optionally, the multimer further comprises a ligand. Each of the duplexes can target the same gene or two different genes; or each of the duplexes can target same gene at two different target sites.

[0301] In one embodiment, two RNAi agents represented by formula (III), (IIIa), (IIIb), (IIIc), and (IIId) are linked to each other at the 5′ end, and one or both of the 3′ ends and are optionally conjugated to a ligand. Each of the agents can target the same gene or two different genes; or each of the agents can target same gene at two different target sites.

[0302] Various publications describe multimeric RNAi agents that can be used in the methods of the disclosure. Such publications include WO2007/091269, WO2010/141511, WO2007/117686, WO2009/014887, and WO2011/031520; and U.S. Pat. No. 7,858,769, the entire contents of each of which are hereby incorporated herein by reference.

[0303] In certain embodiments, the compositions and methods of the disclosure include a vinyl phosphonate (VP) modification of an RNAi agent as described herein. In exemplary embodiments, a vinyl phosphonate of the disclosure has the following structure:

[chemical structure]

[0304] A vinyl phosphonate of the instant disclosure may be attached to either the antisense or the sense strand of a dsRNA of the disclosure. In certain preferred embodiments, a vinyl phosphonate of the instant disclosure is attached to the antisense strand of a dsRNA, optionally at the 5′ end of the antisense strand of the dsRNA.

[0305] Vinyl phosphate modifications are also contemplated for the compositions and methods of the instant disclosure. An exemplary vinyl phosphate structure is:

[chemical structure]

### B. Thermally Destabilizing Modifications

[0306] In certain embodiments, a dsRNA molecule can be optimized for RNA interference by incorporating thermally destabilizing modifications in the seed region of the antisense strand (i.e., at positions 2-9 of the 5′-end of the antisense strand) to reduce or inhibit off-target gene silencing. It has been discovered that dsRNAs with an antisense strand comprising at least one thermally destabilizing modification of the duplex within the first 9 nucleotide positions, counting from the 5′ end, of the antisense strand have reduced off-target gene silencing activity. Accordingly, in some embodiments, the antisense strand comprises at least one (e.g., one, two, three, four, five or more) thermally destabilizing modification of the duplex within the first 9 nucleotide positions of the 5′ region of the antisense strand. In some embodiments, one or more thermally destabilizing modification(s) of the duplex is/are located in positions 2-9, or optionally positions 4-8, from the 5′-end of the antisense strand. In some further embodiments, the thermally destabilizing modification(s) of the duplex is/are located at position 6, 7 or 8 from the 5′-end of the antisense strand. In still some further embodiments, the thermally destabilizing modification of the duplex is located at position 7 from the 5′-end of the antisense strand. The term “thermally destabilizing modification(s)” includes modification(s) that would result with a dsRNA with a lower overall melting temperature (Tm) (optionally a Tm with one, two, three or four degrees lower than the Tm of the dsRNA without having such modification(s). In some embodiments, the thermally destabilizing modification of the duplex is located at position 2, 3, 4, 5 or 9 from the 5′-end of the antisense strand.

[0307] The thermally destabilizing modifications can include, but are not limited to, abasic modification; mismatch with the opposing nucleotide in the opposing strand; and sugar modification such as 2′-deoxy modification or acyclic nucleotide, e.g., unlocked nucleic acids (UNA) or glycol nucleic acid (GNA).

[0308] Exemplified abasic modifications include, but are not limited to the following:

[chemical structure]

### Wherein R=H, Me, Et or OMe; R′=H, Me, Et or OMe; R″=H, Me, Et or OMe

[chemical structure]

wherein B is a modified or unmodified nucleobase.

[0309] Exemplified sugar modifications include, but are not limited to the following.

[chemical structure]

wherein B is a modified or unmodified nucleobase.

[0310] In some embodiments the thermally destabilizing modification of the duplex is selected from the group consisting of:

[chemical structure]

wherein B is a modified or unmodified nucleobase and the asterisk on each structure represents either R, S or racemic.

[0311] The term “acyclic nucleotide” refers to any nucleotide having an acyclic ribose sugar, for example, where any of bonds between the ribose carbons (e.g., C1′-C2′, C2′-C3′, C3′-C4′, C4′-O4′, or C1′-O4′) is absent or at least one of ribose carbons or oxygen (e.g., C1′, C2′, C3′, C4′ or O4′) are independently or in combination absent from the nucleotide. In some embodiments, acyclic nucleotide is

[chemical structure]

wherein B is a modified or unmodified nucleobase, R¹ and R² independently are H, halogen, OR₃, or alkyl; and R₃ is H, alkyl, cycloalkyl, aryl, aralkyl, heteroaryl or sugar). The term “UNA” refers to unlocked acyclic nucleic acid, wherein any of the bonds of the sugar has been removed, forming an unlocked “sugar” residue. In one example, UNA also encompasses monomers with bonds between C1′-C4′ being removed (i.e. the covalent carbon-oxygen-carbon bond between the C1′ and C4′ carbons). In another example, the C2′-C3′ bond (i.e. the covalent carbon-carbon bond between the C2′ and C3′ carbons) of the sugar is removed (see Mikhailov et. al., Tetrahedron Letters, 26 (17): 2059 (1985); and Fluiter et al., Mol. Biosyst., 10: 1039 (2009), which are hereby incorporated by reference in their entirety). The acyclic derivative provides greater backbone flexibility without affecting the Watson-Crick pairings. The acyclic nucleotide can be linked via 2′-5′ or 3′-5′ linkage.

[0312] The term ‘GNA’ refers to glycol nucleic acid which is a polymer similar to DNA or RNA but differing in the composition of its “backbone” in that is composed of repeating glycerol units linked by phosphodiester bonds:

[chemical structure]

[0313] The thermally destabilizing modification of the duplex can be mismatches (i.e., noncomplementary base pairs) between the thermally destabilizing nucleotide and the opposing nucleotide in the opposite strand within the dsRNA duplex. Exemplary mismatch base pairs include G:G, G:A, G:U, G:T, A:A, A:C, C:C, C:U, C:T, U:U, T:T, U:T, or a combination thereof. Other mismatch base pairings known in the art are also amenable to the present disclosure. A mismatch can occur between nucleotides that are either naturally occurring nucleotides or modified nucleotides, i.e., the mismatch base pairing can occur between the nucleobases from respective nucleotides independent of the modifications on the ribose sugars of the nucleotides. In certain embodiments, the dsRNA molecule contains at least one nucleobase in the mismatch pairing that is a 2′-deoxy nucleobase; e.g., the 2′-deoxy nucleobase is in the sense strand.

[0314] In some embodiments, the thermally destabilizing modification of the duplex in the seed region of the antisense strand includes nucleotides with impaired W—C H-bonding to complementary base on the target mRNA, such as:

[chemical structure]

[0315] More examples of abasic nucleotide, acyclic nucleotide modifications (including UNA and GNA), and mismatch modifications have been described in detail in WO 2011/133876, which is herein incorporated by reference in its entirety.

[0316] The thermally destabilizing modifications may also include universal base with reduced or abolished capability to form hydrogen bonds with the opposing bases, and phosphate modifications.

[0317] In some embodiments, the thermally destabilizing modification of the duplex includes nucleotides with non-canonical bases such as, but not limited to, nucleobase modifications with impaired or completely abolished capability to form hydrogen bonds with bases in the opposite strand. These nucleobase modifications have been evaluated for destabilization of the central region of the dsRNA duplex as described in WO 2010/0011895, which is herein incorporated by reference in its entirety. Exemplary nucleobase modifications are:

[chemical structure]

[0318] In some embodiments, the thermally destabilizing modification of the duplex in the seed region of the antisense strand includes one or more α-nucleotide complementary to the base on the target mRNA, such as:

[chemical structure]

wherein R is H, OH, OCH₃, F, NH₂, NHMe, NMe₂ or O-alkyl.

[0319] Exemplary phosphate modifications known to decrease the thermal stability of dsRNA duplexes compared to natural phosphodiester linkages are:

[chemical structure]

[0320] The alkyl for the R group can be a C₁-C₆alkyl. Specific alkyls for the R group include, but are not limited to methyl, ethyl, propyl, isopropyl, butyl, pentyl and hexyl.

[0321] As the skilled artisan will recognize, in view of the functional role of nucleobases is defining specificity of an RNAi agent of the disclosure, while nucleobase modifications can be performed in the various manners as described herein, e.g., to introduce destabilizing modifications into an RNAi agent of the disclosure, e.g., for purpose of enhancing on-target effect relative to off-target effect, the range of modifications available and, in general, present upon RNAi agents of the disclosure tends to be much greater for non-nucleobase modifications, e.g., modifications to sugar groups or phosphate backbones of polyribonucleotides. Such modifications are described in greater detail in other sections of the instant disclosure and are expressly contemplated for RNAi agents of the disclosure, either possessing native nucleobases or modified nucleobases as described above or elsewhere herein.

[0322] In addition to the antisense strand comprising a thermally destabilizing modification, the dsRNA can also comprise one or more stabilizing modifications. For example, the dsRNA can comprise at least two (e.g., two, three, four, five, six, seven, eight, nine, ten or more) stabilizing modifications. Without limitations, the stabilizing modifications all can be present in one strand. In some embodiments, both the sense and the antisense strands comprise at least two stabilizing modifications. The stabilizing modification can occur on any nucleotide of the sense strand or antisense strand. For instance, the stabilizing modification can occur on every nucleotide on the sense strand or antisense strand; each stabilizing modification can occur in an alternating pattern on the sense strand or antisense strand; or the sense strand or antisense strand comprises both stabilizing modification in an alternating pattern. The alternating pattern of the stabilizing modifications on the sense strand may be the same or different from the antisense strand, and the alternating pattern of the stabilizing modifications on the sense strand can have a shift relative to the alternating pattern of the stabilizing modifications on the antisense strand.

[0323] In some embodiments, the antisense strand comprises at least two (e.g., two, three, four, five, six, seven, eight, nine, ten or more) stabilizing modifications. Without limitations, a stabilizing modification in the antisense strand can be present at any positions. In some embodiments, the antisense comprises stabilizing modifications at positions 2, 6, 8, 9, 14, and 16 from the 5′-end. In some other embodiments, the antisense comprises stabilizing modifications at positions 2, 6, 14, and 16 from the 5′-end. In still some other embodiments, the antisense comprises stabilizing modifications at positions 2, 14, and 16 from the 5′-end.

[0324] In some embodiments, the antisense strand comprises at least one stabilizing modification adjacent to the destabilizing modification. For example, the stabilizing modification can be the nucleotide at the 5′-end or the 3′-end of the destabilizing modification, i.e., at position −1 or +1 from the position of the destabilizing modification. In some embodiments, the antisense strand comprises a stabilizing modification at each of the 5′-end and the 3′-end of the destabilizing modification, i.e., positions −1 and +1 from the position of the destabilizing modification.

[0325] In some embodiments, the antisense strand comprises at least two stabilizing modifications at the 3′-end of the destabilizing modification, i.e., at positions +1 and +2 from the position of the destabilizing modification.

[0326] In some embodiments, the sense strand comprises at least two (e.g., two, three, four, five, six, seven, eight, nine, ten or more) stabilizing modifications. Without limitations, a stabilizing modification in the sense strand can be present at any positions. In some embodiments, the sense strand comprises stabilizing modifications at positions 7, 10, and 11 from the 5′-end. In some other embodiments, the sense strand comprises stabilizing modifications at positions 7, 9, 10, and 11 from the 5′-end. In some embodiments, the sense strand comprises stabilizing modifications at positions opposite or complimentary to positions 11, 12, and 15 of the antisense strand, counting from the 5′-end of the antisense strand. In some other embodiments, the sense strand comprises stabilizing modifications at positions opposite or complimentary to positions 11, 12, 13, and 15 of the antisense strand, counting from the 5′-end of the antisense strand. In some embodiments, the sense strand comprises a block of two, three, or four stabilizing modifications.

[0327] In some embodiments, the sense strand does not comprise a stabilizing modification in position opposite or complimentary to the thermally destabilizing modification of the duplex in the antisense strand.

[0328] Exemplary thermally stabilizing modifications include, but are not limited to, 2′-fluoro modifications. Other thermally stabilizing modifications include, but are not limited to, LNA.

[0329] In some embodiments, the dsRNA of the disclosure comprises at least four (e.g., four, five, six, seven, eight, nine, ten, or more) 2′-fluoro nucleotides. Without limitations, the 2′-fluoro nucleotides all can be present in one strand. In some embodiments, both the sense and the antisense strands comprise at least two 2′-fluoro nucleotides. The 2′-fluoro modification can occur on any nucleotide of the sense strand or antisense strand. For instance, the 2′-fluoro modification can occur on every nucleotide on the sense strand or antisense strand; each 2′-fluoro modification can occur in an alternating pattern on the sense strand or antisense strand; or the sense strand or antisense strand comprises both 2′-fluoro modifications in an alternating pattern. The alternating pattern of the 2′-fluoro modifications on the sense strand may be the same or different from the antisense strand, and the alternating pattern of the 2′-fluoro modifications on the sense strand can have a shift relative to the alternating pattern of the 2′-fluoro modifications on the antisense strand.

[0330] In some embodiments, the antisense strand comprises at least two (e.g., two, three, four, five, six, seven, eight, nine, ten, or more) 2′-fluoro nucleotides. Without limitations, a 2′-fluoro modification in the antisense strand can be present at any positions. In some embodiments, the antisense comprises 2′-fluoro nucleotides at positions 2, 6, 8, 9, 14, and 16 from the 5′-end. In some other embodiments, the antisense comprises 2′-fluoro nucleotides at positions 2, 6, 14, and 16 from the 5′-end. In still some other embodiments, the antisense comprises 2′-fluoro nucleotides at positions 2, 14, and 16 from the 5′-end.

[0331] In some embodiments, the antisense strand comprises at least one 2′-fluoro nucleotide adjacent to the destabilizing modification. For example, the 2′-fluoro nucleotide can be the nucleotide at the 5′-end or the 3′-end of the destabilizing modification, i.e., at position −1 or +1 from the position of the destabilizing modification. In some embodiments, the antisense strand comprises a 2′-fluoro nucleotide at each of the 5′-end and the 3′-end of the destabilizing modification, i.e., positions −1 and +1 from the position of the destabilizing modification.

[0332] In some embodiments, the antisense strand comprises at least two 2′-fluoro nucleotides at the 3′-end of the destabilizing modification, i.e., at positions +1 and +2 from the position of the destabilizing modification.

[0333] In some embodiments, the sense strand comprises at least two (e.g., two, three, four, five, six, seven, eight, nine, ten or more) 2′-fluoro nucleotides. Without limitations, a 2′-fluoro modification in the sense strand can be present at any positions. In some embodiments, the antisense comprises 2′-fluoro nucleotides at positions 7, 10, and 11 from the 5′-end. In some other embodiments, the sense strand comprises 2′-fluoro nucleotides at positions 7, 9, 10, and 11 from the 5′-end. In some embodiments, the sense strand comprises 2′-fluoro nucleotides at positions opposite or complimentary to positions 11, 12, and 15 of the antisense strand, counting from the 5′-end of the antisense strand. In some other embodiments, the sense strand comprises 2′-fluoro nucleotides at positions opposite or complimentary to positions 11, 12, 13, and 15 of the antisense strand, counting from the 5′-end of the antisense strand. In some embodiments, the sense strand comprises a block of two, three or four 2′-fluoro nucleotides.

[0334] In some embodiments, the sense strand does not comprise a 2′-fluoro nucleotide in position opposite or complimentary to the thermally destabilizing modification of the duplex in the antisense strand.

[0335] In some embodiments, the dsRNA molecule of the disclosure comprises a 21 nucleotides (nt) sense strand and a 23 nucleotides (nt) antisense, wherein the antisense strand contains at least one thermally destabilizing nucleotide, where the at least one thermally destabilizing nucleotide occurs in the seed region of the antisense strand (i.e., at position 2-9 of the 5′-end of the antisense strand), wherein one end of the dsRNA is blunt, while the other end is comprises a 2 nt overhang, and wherein the dsRNA optionally further has at least one (e.g., one, two, three, four, five, six or all seven) of the following characteristics: (i) the antisense comprises 2, 3, 4, 5 or 6 2′-fluoro modifications; (ii) the antisense comprises 1, 2, 3, 4 or 5 phosphorothioate internucleotide linkages; (iii) the sense strand is conjugated with a ligand; (iv) the sense strand comprises 2, 3, 4 or 5 2′-fluoro modifications; (v) the sense strand comprises 1, 2, 3, 4 or 5 phosphorothioate internucleotide linkages; (vi) the dsRNA comprises at least four 2′-fluoro modifications; and (vii) the dsRNA comprises a blunt end at 5′-end of the antisense strand. Optionally, the 2 nt overhang is at the 3′-end of the antisense.

[0336] In some embodiments, the dsRNA molecule of the disclosure comprising a sense and antisense strands, wherein: the sense strand is 25-30 nucleotide residues in length, wherein starting from the 5′ terminal nucleotide (position 1), positions 1 to 23 of said sense strand comprise at least 8 ribonucleotides; antisense strand is 36-66 nucleotide residues in length and, starting from the 3′ terminal nucleotide, at least 8 ribonucleotides in the positions paired with positions 1-23 of sense strand to form a duplex; wherein at least the 3′ terminal nucleotide of antisense strand is unpaired with sense strand, and up to 6 consecutive 3′ terminal nucleotides are unpaired with sense strand, thereby forming a 3′ single stranded overhang of 1-6 nucleotides; wherein the 5′ terminus of antisense strand comprises from 10-30 consecutive nucleotides which are unpaired with sense strand, thereby forming a 10-30 nucleotide single stranded 5′ overhang; wherein at least the sense strand 5′ terminal and 3′ terminal nucleotides are base paired with nucleotides of antisense strand when sense and antisense strands are aligned for maximum complementarity, thereby forming a substantially duplexed region between sense and antisense strands; and antisense strand is sufficiently complementary to a target RNA along at least 19 ribonucleotides of antisense strand length to reduce target gene expression when said double stranded nucleic acid is introduced into a mammalian cell; and wherein the antisense strand contains at least one thermally destabilizing nucleotide, where at least one thermally destabilizing nucleotide is in the seed region of the antisense strand (i.e. at position 2-9 of the 5′-end of the antisense strand). For example, the thermally destabilizing nucleotide occurs between positions opposite or complimentary to positions 14-17 of the 5′-end of the sense strand, and wherein the dsRNA optionally further has at least one (e.g., one, two, three, four, five, six or all seven) of the following characteristics: (i) the antisense comprises 2, 3, 4, 5, or 6 2′-fluoro modifications; (ii) the antisense comprises 1, 2, 3, 4, or 5 phosphorothioate internucleotide linkages; (iii) the sense strand is conjugated with a ligand; (iv) the sense strand comprises 2, 3, 4, or 5 2′-fluoro modifications; (v) the sense strand comprises 1, 2, 3, 4, or 5 phosphorothioate internucleotide linkages; and (vi) the dsRNA comprises at least four 2′-fluoro modifications; and (vii) the dsRNA comprises a duplex region of 12-30 nucleotide pairs in length.

[0337] In some embodiments, the dsRNA molecule of the disclosure comprises a sense and antisense strands, wherein said dsRNA molecule comprises a sense strand having a length which is at least 25 and at most 29 nucleotides and an antisense strand having a length which is at most 30 nucleotides with the sense strand comprises a modified nucleotide that is susceptible to enzymatic degradation at position 11 from the 5′end, wherein the 3′ end of said sense strand and the 5′ end of said antisense strand form a blunt end and said antisense strand is 1-4 nucleotides longer at its 3′ end than the sense strand, wherein the duplex region which is at least 25 nucleotides in length, and said antisense strand is sufficiently complementary to a target mRNA along at least 19 nt of said antisense strand length to reduce target gene expression when said dsRNA molecule is introduced into a mammalian cell, and wherein dicer cleavage of said dsRNA preferentially results in an siRNA comprising said 3′ end of said antisense strand, thereby reducing expression of the target gene in the mammal, wherein the antisense strand contains at least one thermally destabilizing nucleotide, where the at least one thermally destabilizing nucleotide is in the seed region of the antisense strand (i.e. at position 2-9 of the 5′-end of the antisense strand), and wherein the dsRNA optionally further has at least one (e.g., one, two, three, four, five, six or all seven) of the following characteristics: (i) the antisense comprises 2, 3, 4, 5, or 6 2′-fluoro modifications; (ii) the antisense comprises 1, 2, 3, 4, or 5 phosphorothioate internucleotide linkages; (iii) the sense strand is conjugated with a ligand; (iv) the sense strand comprises 2, 3, 4, or 5 2′-fluoro modifications; (v) the sense strand comprises 1, 2, 3, 4, or 5 phosphorothioate internucleotide linkages; and (vi) the dsRNA comprises at least four 2′-fluoro modifications; and (vii) the dsRNA has a duplex region of 12-29 nucleotide pairs in length.

[0338] In some embodiments, every nucleotide in the sense strand and antisense strand of the dsRNA molecule may be modified. Each nucleotide may be modified with the same or different modification which can include one or more alteration of one or both of the non-linking phosphate oxygens or of one or more of the linking phosphate oxygens; alteration of a constituent of the ribose sugar, e.g., of the 2′ hydroxyl on the ribose sugar; wholesale replacement of the phosphate moiety with “dephospho” linkers; modification or replacement of a naturally occurring base; and replacement or modification of the ribose-phosphate backbone.

[0339] As nucleic acids are polymers of subunits, many of the modifications occur at a position which is repeated within a nucleic acid, e.g., a modification of a base, or a phosphate moiety, or a non-linking O of a phosphate moiety. In some cases, the modification will occur at all of the subject positions in the nucleic acid but in many cases it will not. By way of example, a modification may only occur at a 3′ or 5′ terminal position, may only occur in a terminal region, e.g., at a position on a terminal nucleotide or in the last 2, 3, 4, 5, or 10 nucleotides of a strand. A modification may occur in a double strand region, a single strand region, or in both. A modification may occur only in the double strand region of an RNA or may only occur in a single strand region of an RNA. E.g., a phosphorothioate modification at a non-linking O position may only occur at one or both termini, may only occur in a terminal region, e.g., at a position on a terminal nucleotide or in the last 2, 3, 4, 5, or 10 nucleotides of a strand, or may occur in double strand and single strand regions, particularly at termini. The 5′ end or ends can be phosphorylated.

[0340] It may be possible, e.g., to enhance stability, to include particular bases in overhangs, or to include modified nucleotides or nucleotide surrogates, in single strand overhangs, e.g., in a 5′ or 3′ overhang, or in both. E.g., it can be desirable to include purine nucleotides in overhangs. In some embodiments all or some of the bases in a 3′ or 5′ overhang may be modified, e.g., with a modification described herein. Modifications can include, e.g., the use of modifications at the 2′ position of the ribose sugar with modifications that are known in the art, e.g., the use of deoxyribonucleotides, 2′-deoxy-2′-fluoro (2′-F) or 2′-O-methyl modified instead of the ribosugar of the nucleobase, and modifications in the phosphate group, e.g., phosphorothioate modifications. Overhangs need not be homologous with the target sequence.

[0341] In some embodiments, each residue of the sense strand and antisense strand is independently modified with LNA, HNA, CeNA, 2′-methoxyethyl, 2′-O-methyl, 2′-O-allyl, 2′-C-allyl, 2′-deoxy, or 2′-fluoro. The strands can contain more than one modification. In some embodiments, each residue of the sense strand and antisense strand is independently modified with 2′-O-methyl or 2′-fluoro. It is to be understood that these modifications are in addition to the at least one thermally destabilizing modification of the duplex present in the antisense strand.

[0342] At least two different modifications are typically present on the sense strand and antisense strand. Those two modifications may be the 2′-deoxy, 2′-O-methyl or 2′-fluoro modifications, acyclic nucleotides or others. In some embodiments, the sense strand and antisense strand each comprises two differently modified nucleotides selected from 2′-O-methyl or 2′-deoxy. In some embodiments, each residue of the sense strand and antisense strand is independently modified with 2′-O-methyl nucleotide, 2′-deoxy nucleotide, 2′-deoxy-2′-fluoro nucleotide, 2′-O—N-methylacetamido (2′-O—NMA) nucleotide, a 2′-O-dimethylaminoethoxyethyl (2′-O-DMAEOE) nucleotide, 2′-O-aminopropyl (2′-O-AP) nucleotide, or 2′-ara-F nucleotide. Again, it is to be understood that these modifications are in addition to the at least one thermally destabilizing modification of the duplex present in the antisense strand.

[0343] In some embodiments, the dsRNA molecule of the disclosure comprises modifications of an alternating pattern, particular in the B1, B2, B3, B1′, B2′, B3′, B4′ regions. The term “alternating motif” or “alternative pattern” as used herein refers to a motif having one or more modifications, each modification occurring on alternating nucleotides of one strand. The alternating nucleotide may refer to one per every other nucleotide or one per every three nucleotides, or a similar pattern. For example, if A, B and C each represent one type of modification to the nucleotide, the alternating motif can be “ABABABABABAB . . . ,” “AABBAABBAABB . . . ,” “AABAABAABAAB . . . ,” “AAABAAABAAAB . . . ,” “AAABBBAAABBB . . . ,” or “ABCABCABCABC . . . ,” etc.

[0344] The type of modifications contained in the alternating motif may be the same or different. For example, if A, B, C, D each represent one type of modification on the nucleotide, the alternating pattern, i.e., modifications on every other nucleotide, may be the same, but each of the sense strand or antisense strand can be selected from several possibilities of modifications within the alternating motif such as “ABABAB . . . ”, “ACACAC . . . ” “BDBDBD . . . ” or “CDCDCD . . . ,” etc.

[0345] In some embodiments, the dsRNA molecule of the disclosure comprises the modification pattern for the alternating motif on the sense strand relative to the modification pattern for the alternating motif on the antisense strand is shifted. The shift may be such that the modified group of nucleotides of the sense strand corresponds to a differently modified group of nucleotides of the antisense strand and vice versa. For example, the sense strand when paired with the antisense strand in the dsRNA duplex, the alternating motif in the sense strand may start with “ABABAB” from 5′-3′ of the strand and the alternating motif in the antisense strand may start with “BABABA” from 3′-5′ of the strand within the duplex region. As another example, the alternating motif in the sense strand may start with “AABBAABB” from 5′-3′ of the strand and the alternating motif in the antisense strand may start with “BBAABBAA” from 3′-5′ of the strand within the duplex region, so that there is a complete or partial shift of the modification patterns between the sense strand and the antisense strand.

[0346] The dsRNA molecule of the disclosure may further comprise at least one phosphorothioate or methylphosphonate internucleotide linkage. The phosphorothioate or methylphosphonate internucleotide linkage modification may occur on any nucleotide of the sense strand or antisense strand or both in any position of the strand. For instance, the internucleotide linkage modification may occur on every nucleotide on the sense strand or antisense strand; each internucleotide linkage modification may occur in an alternating pattern on the sense strand or antisense strand; or the sense strand or antisense strand comprises both internucleotide linkage modifications in an alternating pattern. The alternating pattern of the internucleotide linkage modification on the sense strand may be the same or different from the antisense strand, and the alternating pattern of the internucleotide linkage modification on the sense strand may have a shift relative to the alternating pattern of the internucleotide linkage modification on the antisense strand.

[0347] In some embodiments, the dsRNA molecule comprises the phosphorothioate or methylphosphonate internucleotide linkage modification in the overhang region. For example, the overhang region comprises two nucleotides having a phosphorothioate or methylphosphonate internucleotide linkage between the two nucleotides. Internucleotide linkage modifications also may be made to link the overhang nucleotides with the terminal paired nucleotides within duplex region. For example, at least 2, 3, 4, or all the overhang nucleotides may be linked through phosphorothioate or methylphosphonate internucleotide linkage, and optionally, there may be additional phosphorothioate or methylphosphonate internucleotide linkages linking the overhang nucleotide with a paired nucleotide that is next to the overhang nucleotide. For instance, there may be at least two phosphorothioate internucleotide linkages between the terminal three nucleotides, in which two of the three nucleotides are overhang nucleotides, and the third is a paired nucleotide next to the overhang nucleotide. Optionally, these terminal three nucleotides may be at the 3′-end of the antisense strand.

[0348] In some embodiments, the sense strand of the dsRNA molecule comprises 1-10 blocks of two to ten phosphorothioate or methylphosphonate internucleotide linkages separated by 1, 2, 3, 4, 5, 6, 7, 8, 9, 10, 11, 12, 13, 14, 15, or 16 phosphate internucleotide linkages, wherein one of the phosphorothioate or methylphosphonate internucleotide linkages is placed at any position in the oligonucleotide sequence and the said sense strand is paired with an antisense strand comprising any combination of phosphorothioate, methylphosphonate and phosphate internucleotide linkages or an antisense strand comprising either phosphorothioate or methylphosphonate or phosphate linkage.

[0349] In some embodiments, the antisense strand of the dsRNA molecule comprises two blocks of two phosphorothioate or methylphosphonate internucleotide linkages separated by 1, 2, 3, 4, 5, 6, 7, 8, 9, 10, 11, 12, 13, 14, 15, 16, 17, or 18 phosphate internucleotide linkages, wherein one of the phosphorothioate or methylphosphonate internucleotide linkages is placed at any position in the oligonucleotide sequence and the said antisense strand is paired with a sense strand comprising any combination of phosphorothioate, methylphosphonate and phosphate internucleotide linkages or an antisense strand comprising either phosphorothioate or methylphosphonate or phosphate linkage.

[0350] In some embodiments, the antisense strand of the dsRNA molecule comprises two blocks of three phosphorothioate or methylphosphonate internucleotide linkages separated by 1, 2, 3, 4, 5, 6, 7, 8, 9, 10, 11, 12, 13, 14, 15, or 16 phosphate internucleotide linkages, wherein one of the phosphorothioate or methylphosphonate internucleotide linkages is placed at any position in the oligonucleotide sequence and the said antisense strand is paired with a sense strand comprising any combination of phosphorothioate, methylphosphonate and phosphate internucleotide linkages or an antisense strand comprising either phosphorothioate or methylphosphonate or phosphate linkage.

[0351] In some embodiments, the antisense strand of the dsRNA molecule comprises two blocks of four phosphorothioate or methylphosphonate internucleotide linkages separated by 1, 2, 3, 4, 5, 6, 7, 8, 9, 10, 11, 12, 13, or 14 phosphate internucleotide linkages, wherein one of the phosphorothioate or methylphosphonate internucleotide linkages is placed at any position in the oligonucleotide sequence and the said antisense strand is paired with a sense strand comprising any combination of phosphorothioate, methylphosphonate and phosphate internucleotide linkages or an antisense strand comprising either phosphorothioate or methylphosphonate or phosphate linkage.

[0352] In some embodiments, the antisense strand of the dsRNA molecule comprises two blocks of five phosphorothioate or methylphosphonate internucleotide linkages separated by 1, 2, 3, 4, 5, 6, 7, 8, 9, 10, 11, or 12 phosphate internucleotide linkages, wherein one of the phosphorothioate or methylphosphonate internucleotide linkages is placed at any position in the oligonucleotide sequence and the said antisense strand is paired with a sense strand comprising any combination of phosphorothioate, methylphosphonate and phosphate internucleotide linkages or an antisense strand comprising either phosphorothioate or methylphosphonate or phosphate linkage.

[0353] In some embodiments, the antisense strand of the dsRNA molecule comprises two blocks of six phosphorothioate or methylphosphonate internucleotide linkages separated by 1, 2, 3, 4, 5, 6, 7, 8, 9, or 10 phosphate internucleotide linkages, wherein one of the phosphorothioate or methylphosphonate internucleotide linkages is placed at any position in the oligonucleotide sequence and the said antisense strand is paired with a sense strand comprising any combination of phosphorothioate, methylphosphonate and phosphate internucleotide linkages or an antisense strand comprising either phosphorothioate or methylphosphonate or phosphate linkage.

[0354] In some embodiments, the antisense strand of the dsRNA molecule comprises two blocks of seven phosphorothioate or methylphosphonate internucleotide linkages separated by 1, 2, 3, 4, 5, 6, 7, or 8 phosphate internucleotide linkages, wherein one of the phosphorothioate or methylphosphonate internucleotide linkages is placed at any position in the oligonucleotide sequence and the said antisense strand is paired with a sense strand comprising any combination of phosphorothioate, methylphosphonate and phosphate internucleotide linkages or an antisense strand comprising either phosphorothioate or methylphosphonate or phosphate linkage.

[0355] In some embodiments, the antisense strand of the dsRNA molecule comprises two blocks of eight phosphorothioate or methylphosphonate internucleotide linkages separated by 1, 2, 3, 4, 5, or 6 phosphate internucleotide linkages, wherein one of the phosphorothioate or methylphosphonate internucleotide linkages is placed at any position in the oligonucleotide sequence and the said antisense strand is paired with a sense strand comprising any combination of phosphorothioate, methylphosphonate and phosphate internucleotide linkages or an antisense strand comprising either phosphorothioate or methylphosphonate or phosphate linkage.

[0356] In some embodiments, the antisense strand of the dsRNA molecule comprises two blocks of nine phosphorothioate or methylphosphonate internucleotide linkages separated by 1, 2, 3, or 4 phosphate internucleotide linkages, wherein one of the phosphorothioate or methylphosphonate internucleotide linkages is placed at any position in the oligonucleotide sequence and the said antisense strand is paired with a sense strand comprising any combination of phosphorothioate, methylphosphonate and phosphate internucleotide linkages or an antisense strand comprising either phosphorothioate or methylphosphonate or phosphate linkage.

[0357] In some embodiments, the dsRNA molecule of the disclosure further comprises one or more phosphorothioate or methylphosphonate internucleotide linkage modification within 1-10 of the termini position(s) of the sense or antisense strand. For example, at least 2, 3, 4, 5, 6, 7, 8, 9, or 10 nucleotides may be linked through phosphorothioate or methylphosphonate internucleotide linkage at one end or both ends of the sense or antisense strand.

[0358] In some embodiments, the dsRNA molecule of the disclosure further comprises one or more phosphorothioate or methylphosphonate internucleotide linkage modification within 1-10 of the internal region of the duplex of each of the sense or antisense strand. For example, at least 2, 3, 4, 5, 6, 7, 8, 9, or 10 nucleotides may be linked through phosphorothioate methylphosphonate internucleotide linkage at position 8-16 of the duplex region counting from the 5′-end of the sense strand; the dsRNA molecule can optionally further comprise one or more phosphorothioate or methylphosphonate internucleotide linkage modification within 1-10 of the termini position(s).

[0359] In some embodiments, the dsRNA molecule of the disclosure further comprises one to five phosphorothioate or methylphosphonate internucleotide linkage modification(s) within position 1-5 and one to five phosphorothioate or methylphosphonate internucleotide linkage modification(s) within position 18-23 of the sense strand (counting from the 5′-end), and one to five phosphorothioate or methylphosphonate internucleotide linkage modification at positions 1 and 2 and one to five within positions 18-23 of the antisense strand (counting from the 5′-end).

[0360] In some embodiments, the dsRNA molecule of the disclosure further comprises one phosphorothioate internucleotide linkage modification within position 1-5 and one phosphorothioate or methylphosphonate internucleotide linkage modification within position 18-23 of the sense strand (counting from the 5′-end), and one phosphorothioate internucleotide linkage modification at positions 1 and 2 and two phosphorothioate or methylphosphonate internucleotide linkage modifications within positions 18-23 of the antisense strand (counting from the 5′-end).

[0361] In some embodiments, the dsRNA molecule of the disclosure further comprises two phosphorothioate internucleotide linkage modifications within position 1-5 and one phosphorothioate internucleotide linkage modification within position 18-23 of the sense strand (counting from the 5′-end), and one phosphorothioate internucleotide linkage modification at positions 1 and 2 and two phosphorothioate internucleotide linkage modifications within positions 18-23 of the antisense strand (counting from the 5′-end).

[0362] In some embodiments, the dsRNA molecule of the disclosure further comprises two phosphorothioate internucleotide linkage modifications within position 1-5 and two phosphorothioate internucleotide linkage modifications within position 18-23 of the sense strand (counting from the 5′-end), and one phosphorothioate internucleotide linkage modification at positions 1 and 2 and two phosphorothioate internucleotide linkage modifications within positions 18-23 of the antisense strand (counting from the 5′-end).

[0363] In some embodiments, the dsRNA molecule of the disclosure further comprises two phosphorothioate internucleotide linkage modifications within position 1-5 and two phosphorothioate internucleotide linkage modifications within position 18-23 of the sense strand (counting from the 5′-end), and one phosphorothioate internucleotide linkage modification at positions 1 and 2 and one phosphorothioate internucleotide linkage modification within positions 18-23 of the antisense strand (counting from the 5′-end).

[0364] In some embodiments, the dsRNA molecule of the disclosure further comprises one phosphorothioate internucleotide linkage modification within position 1-5 and one phosphorothioate internucleotide linkage modification within position 18-23 of the sense strand (counting from the 5′-end), and two phosphorothioate internucleotide linkage modifications at positions 1 and 2 and two phosphorothioate internucleotide linkage modifications within positions 18-23 of the antisense strand (counting from the 5′-end).

[0365] In some embodiments, the dsRNA molecule of the disclosure further comprises one phosphorothioate internucleotide linkage modification within position 1-5 and one within position 18-23 of the sense strand (counting from the 5′-end), and two phosphorothioate internucleotide linkage modification at positions 1 and 2 and one phosphorothioate internucleotide linkage modification within positions 18-23 of the antisense strand (counting from the 5′-end).

[0366] In some embodiments, the dsRNA molecule of the disclosure further comprises one phosphorothioate internucleotide linkage modification within position 1-5 (counting from the 5′-end) of the sense strand, and two phosphorothioate internucleotide linkage modifications at positions 1 and 2 and one phosphorothioate internucleotide linkage modification within positions 18-23 of the antisense strand (counting from the 5′-end).

[0367] In some embodiments, the dsRNA molecule of the disclosure further comprises two phosphorothioate internucleotide linkage modifications within position 1-5 (counting from the 5′-end) of the sense strand, and one phosphorothioate internucleotide linkage modification at positions 1 and 2 and two phosphorothioate internucleotide linkage modifications within positions 18-23 of the antisense strand (counting from the 5′-end).

[0368] In some embodiments, the dsRNA molecule of the disclosure further comprises two phosphorothioate internucleotide linkage modifications within position 1-5 and one within position 18-23 of the sense strand (counting from the 5′-end), and two phosphorothioate internucleotide linkage modifications at positions 1 and 2 and one phosphorothioate internucleotide linkage modification within positions 18-23 of the antisense strand (counting from the 5′-end).

[0369] In some embodiments, the dsRNA molecule of the disclosure further comprises two phosphorothioate internucleotide linkage modifications within position 1-5 and one phosphorothioate internucleotide linkage modification within position 18-23 of the sense strand (counting from the 5′-end), and two phosphorothioate internucleotide linkage modifications at positions 1 and 2 and two phosphorothioate internucleotide linkage modifications within positions 18-23 of the antisense strand (counting from the 5′-end).

[0370] In some embodiments, the dsRNA molecule of the disclosure further comprises two phosphorothioate internucleotide linkage modifications within position 1-5 and one phosphorothioate internucleotide linkage modification within position 18-23 of the sense strand (counting from the 5′-end), and one phosphorothioate internucleotide linkage modification at positions 1 and 2 and two phosphorothioate internucleotide linkage modifications within positions 18-23 of the antisense strand (counting from the 5′-end).

[0371] In some embodiments, the dsRNA molecule of the disclosure further comprises two phosphorothioate internucleotide linkage modifications at position 1 and 2, and two phosphorothioate internucleotide linkage modifications at position 20 and 21 of the sense strand (counting from the 5′-end), and one phosphorothioate internucleotide linkage modification at positions 1 and one at position 21 of the antisense strand (counting from the 5′-end).

[0372] In some embodiments, the dsRNA molecule of the disclosure further comprises one phosphorothioate internucleotide linkage modification at position 1, and one phosphorothioate internucleotide linkage modification at position 21 of the sense strand (counting from the 5′-end), and two phosphorothioate internucleotide linkage modifications at positions 1 and 2 and two phosphorothioate internucleotide linkage modifications at positions 20 and 21 the antisense strand (counting from the 5′-end).

[0373] In some embodiments, the dsRNA molecule of the disclosure further comprises two phosphorothioate internucleotide linkage modifications at position 1 and 2, and two phosphorothioate internucleotide linkage modifications at position 21 and 22 of the sense strand (counting from the 5′-end), and one phosphorothioate internucleotide linkage modification at positions 1 and one phosphorothioate internucleotide linkage modification at position 21 of the antisense strand (counting from the 5′-end).

[0374] In some embodiments, the dsRNA molecule of the disclosure further comprises one phosphorothioate internucleotide linkage modification at position 1, and one phosphorothioate internucleotide linkage modification at position 21 of the sense strand (counting from the 5′-end), and two phosphorothioate internucleotide linkage modifications at positions 1 and 2 and two phosphorothioate internucleotide linkage modifications at positions 21 and 22 the antisense strand (counting from the 5′-end).

[0375] In some embodiments, the dsRNA molecule of the disclosure further comprises two phosphorothioate internucleotide linkage modifications at position 1 and 2, and two phosphorothioate internucleotide linkage modifications at position 22 and 23 of the sense strand (counting from the 5′-end), and one phosphorothioate internucleotide linkage modification at positions 1 and one phosphorothioate internucleotide linkage modification at position 21 of the antisense strand (counting from the 5′-end).

[0376] In some embodiments, the dsRNA molecule of the disclosure further comprises one phosphorothioate internucleotide linkage modification at position 1, and one phosphorothioate internucleotide linkage modification at position 21 of the sense strand (counting from the 5′-end), and two phosphorothioate internucleotide linkage modifications at positions 1 and 2 and two phosphorothioate internucleotide linkage modifications at positions 23 and 23 the antisense strand (counting from the 5′-end).

[0377] In some embodiments, compound of the disclosure comprises a pattern of backbone chiral centers. In some embodiments, a common pattern of backbone chiral centers comprises at least 5 internucleotidic linkages in the Sp configuration. In some embodiments, a common pattern of backbone chiral centers comprises at least 6 internucleotidic linkages in the Sp configuration. In some embodiments, a common pattern of backbone chiral centers comprises at least 7 internucleotidic linkages in the Sp configuration. In some embodiments, a common pattern of backbone chiral centers comprises at least 8 internucleotidic linkages in the Sp configuration. In some embodiments, a common pattern of backbone chiral centers comprises at least 9 internucleotidic linkages in the Sp configuration. In some embodiments, a common pattern of backbone chiral centers comprises at least 10 internucleotidic linkages in the Sp configuration. In some embodiments, a common pattern of backbone chiral centers comprises at least 11 internucleotidic linkages in the Sp configuration. In some embodiments, a common pattern of backbone chiral centers comprises at least 12 internucleotidic linkages in the Sp configuration. In some embodiments, a common pattern of backbone chiral centers comprises at least 13 internucleotidic linkages in the Sp configuration. In some embodiments, a common pattern of backbone chiral centers comprises at least 14 internucleotidic linkages in the Sp configuration. In some embodiments, a common pattern of backbone chiral centers comprises at least 15 internucleotidic linkages in the Sp configuration. In some embodiments, a common pattern of backbone chiral centers comprises at least 16 internucleotidic linkages in the Sp configuration. In some embodiments, a common pattern of backbone chiral centers comprises at least 17 internucleotidic linkages in the Sp configuration. In some embodiments, a common pattern of backbone chiral centers comprises at least 18 internucleotidic linkages in the Sp configuration. In some embodiments, a common pattern of backbone chiral centers comprises at least 19 internucleotidic linkages in the Sp configuration. In some embodiments, a common pattern of backbone chiral centers comprises no more than 8 internucleotidic linkages in the Rp configuration. In some embodiments, a common pattern of backbone chiral centers comprises no more than 7 internucleotidic linkages in the Rp configuration. In some embodiments, a common pattern of backbone chiral centers comprises no more than 6 internucleotidic linkages in the Rp configuration. In some embodiments, a common pattern of backbone chiral centers comprises no more than 5 internucleotidic linkages in the Rp configuration. In some embodiments, a common pattern of backbone chiral centers comprises no more than 4 internucleotidic linkages in the Rp configuration. In some embodiments, a common pattern of backbone chiral centers comprises no more than 3 internucleotidic linkages in the Rp configuration. In some embodiments, a common pattern of backbone chiral centers comprises no more than 2 internucleotidic linkages in the Rp configuration. In some embodiments, a common pattern of backbone chiral centers comprises no more than 1 internucleotidic linkages in the Rp configuration. In some embodiments, a common pattern of backbone chiral centers comprises no more than 8 internucleotidic linkages which are not chiral (as a non-limiting example, a phosphodiester). In some embodiments, a common pattern of backbone chiral centers comprises no more than 7 internucleotidic linkages which are not chiral. In some embodiments, a common pattern of backbone chiral centers comprises no more than 6 internucleotidic linkages which are not chiral. In some embodiments, a common pattern of backbone chiral centers comprises no more than 5 internucleotidic linkages which are not chiral. In some embodiments, a common pattern of backbone chiral centers comprises no more than 4 internucleotidic linkages which are not chiral. In some embodiments, a common pattern of backbone chiral centers comprises no more than 3 internucleotidic linkages which are not chiral. In some embodiments, a common pattern of backbone chiral centers comprises no more than 2 internucleotidic linkages which are not chiral. In some embodiments, a common pattern of backbone chiral centers comprises no more than 1 internucleotidic linkages which are not chiral. In some embodiments, a common pattern of backbone chiral centers comprises at least 10 internucleotidic linkages in the Sp configuration, and no more than 8 internucleotidic linkages which are not chiral. In some embodiments, a common pattern of backbone chiral centers comprises at least 11 internucleotidic linkages in the Sp configuration, and no more than 7 internucleotidic linkages which are not chiral. In some embodiments, a common pattern of backbone chiral centers comprises at least 12 internucleotidic linkages in the Sp configuration, and no more than 6 internucleotidic linkages which are not chiral. In some embodiments, a common pattern of backbone chiral centers comprises at least 13 internucleotidic linkages in the Sp configuration, and no more than 6 internucleotidic linkages which are not chiral. In some embodiments, a common pattern of backbone chiral centers comprises at least 14 internucleotidic linkages in the Sp configuration, and no more than 5 internucleotidic linkages which are not chiral. In some embodiments, a common pattern of backbone chiral centers comprises at least 15 internucleotidic linkages in the Sp configuration, and no more than 4 internucleotidic linkages which are not chiral. In some embodiments, the internucleotidic linkages in the Sp configuration are optionally contiguous or not contiguous. In some embodiments, the internucleotidic linkages in the Rp configuration are optionally contiguous or not contiguous. In some embodiments, the internucleotidic linkages which are not chiral are optionally contiguous or not contiguous.

[0378] In some embodiments, compound of the disclosure comprises a block is a stereochemistry block. In some embodiments, a block is an Rp block in that each internucleotidic linkage of the block is Rp. In some embodiments, a 5′-block is an Rp block. In some embodiments, a 3′-block is an Rp block. In some embodiments, a block is an Sp block in that each internucleotidic linkage of the block is Sp. In some embodiments, a 5′-block is an Sp block. In some embodiments, a 3′-block is an Sp block. In some embodiments, provided oligonucleotides comprise both Rp and Sp blocks. In some embodiments, provided oligonucleotides comprise one or more Rp but no Sp blocks. In some embodiments, provided oligonucleotides comprise one or more Sp but no Rp blocks. In some embodiments, provided oligonucleotides comprise one or more PO blocks wherein each internucleotidic linkage in a natural phosphate linkage.

[0379] In some embodiments, compound of the disclosure comprises a 5′-block is an Sp block wherein each sugar moiety comprises a 2′-F modification. In some embodiments, a 5′-block is an Sp block wherein each of internucleotidic linkage is a modified internucleotidic linkage and each sugar moiety comprises a 2′-F modification. In some embodiments, a 5′-block is an Sp block wherein each of internucleotidic linkage is a phosphorothioate linkage and each sugar moiety comprises a 2′-F modification. In some embodiments, a 5′-block comprises 4 or more nucleoside units. In some embodiments, a 5′-block comprises 5 or more nucleoside units. In some embodiments, a 5′-block comprises 6 or more nucleoside units. In some embodiments, a 5′-block comprises 7 or more nucleoside units. In some embodiments, a 3′-block is an Sp block wherein each sugar moiety comprises a 2′-F modification. In some embodiments, a 3′-block is an Sp block wherein each of internucleotidic linkage is a modified internucleotidic linkage and each sugar moiety comprises a 2′-F modification. In some embodiments, a 3′-block is an Sp block wherein each of internucleotidic linkage is a phosphorothioate linkage and each sugar moiety comprises a 2′-F modification. In some embodiments, a 3′-block comprises 4 or more nucleoside units. In some embodiments, a 3′-block comprises 5 or more nucleoside units. In some embodiments, a 3′-block comprises 6 or more nucleoside units. In some embodiments, a 3′-block comprises 7 or more nucleoside units.

[0380] In some embodiments, compound of the disclosure comprises a type of nucleoside in a region or an oligonucleotide is followed by a specific type of internucleotidic linkage, e.g., natural phosphate linkage, modified internucleotidic linkage, Rp chiral internucleotidic linkage, Sp chiral internucleotidic linkage, etc. In some embodiments, A is followed by Sp. In some embodiments, A is followed by Rp. In some embodiments, A is followed by natural phosphate linkage (PO). In some embodiments, U is followed by Sp. In some embodiments, U is followed by Rp. In some embodiments, U is followed by natural phosphate linkage (PO). In some embodiments, C is followed by Sp. In some embodiments, C is followed by Rp. In some embodiments, C is followed by natural phosphate linkage (PO). In some embodiments, G is followed by Sp. In some embodiments, G is followed by Rp. In some embodiments, G is followed by natural phosphate linkage (PO). In some embodiments, C and U are followed by Sp. In some embodiments, C and U are followed by Rp. In some embodiments, C and U are followed by natural phosphate linkage (PO). In some embodiments, A and G are followed by Sp. In some embodiments, A and G are followed by Rp.

[0381] In some embodiments, the antisense strand comprises phosphorothioate internucleotide linkages between nucleotide positions 21 and 22, and between nucleotide positions 22 and 23, wherein the antisense strand contains at least one thermally destabilizing modification of the duplex located in the seed region of the antisense strand (i.e., at position 2-9 of the 5′-end of the antisense strand), and wherein the dsRNA optionally further has at least one (e.g., one, two, three, four, five, six, seven or all eight) of the following characteristics: (i) the antisense comprises 2, 3, 4, 5 or 6 2′-fluoro modifications; (ii) the antisense comprises 3, 4 or 5 phosphorothioate internucleotide linkages; (iii) the sense strand is conjugated with a ligand; (iv) the sense strand comprises 2, 3, 4 or 5 2′-fluoro modifications; (v) the sense strand comprises 1, 2, 3, 4 or 5 phosphorothioate internucleotide linkages; (vi) the dsRNA comprises at least four 2′-fluoro modifications; (vii) the dsRNA comprises a duplex region of 12-40 nucleotide pairs in length; and (viii) the dsRNA has a blunt end at 5′-end of the antisense strand.

[0382] In some embodiments, the antisense strand comprises phosphorothioate internucleotide linkages between nucleotide positions 1 and 2, between nucleotide positions 2 and 3, between nucleotide positions 21 and 22, and between nucleotide positions 22 and 23, wherein the antisense strand contains at least one thermally destabilizing modification of the duplex located in the seed region of the antisense strand (i.e., at position 2-9 of the 5′-end of the antisense strand), and wherein the dsRNA optionally further has at least one (e.g., one, two, three, four, five, six, seven or all eight) of the following characteristics: (i) the antisense comprises 2, 3, 4, 5 or 6 2′-fluoro modifications; (ii) the sense strand is conjugated with a ligand; (iii) the sense strand comprises 2, 3, 4 or 5 2′-fluoro modifications; (iv) the sense strand comprises 1, 2, 3, 4 or 5 phosphorothioate internucleotide linkages; (v) the dsRNA comprises at least four 2′-fluoro modifications; (vi) the dsRNA comprises a duplex region of 12-40 nucleotide pairs in length; (vii) the dsRNA comprises a duplex region of 12-40 nucleotide pairs in length; and (viii) the dsRNA has a blunt end at 5′-end of the antisense strand.

[0383] In some embodiments, the sense strand comprises phosphorothioate internucleotide linkages between nucleotide positions 1 and 2, and between nucleotide positions 2 and 3, wherein the antisense strand contains at least one thermally destabilizing modification of the duplex located in the seed region of the antisense strand (i.e., at position 2-9 of the 5′-end of the antisense strand), and wherein the dsRNA optionally further has at least one (e.g., one, two, three, four, five, six, seven or all eight) of the following characteristics: (i) the antisense comprises 2, 3, 4, 5 or 6 2′-fluoro modifications; (ii) the antisense comprises 1, 2, 3, 4 or 5 phosphorothioate internucleotide linkages; (iii) the sense strand is conjugated with a ligand; (iv) the sense strand comprises 2, 3, 4 or 5 2′-fluoro modifications; (v) the sense strand comprises 3, 4 or 5 phosphorothioate internucleotide linkages; (vi) the dsRNA comprises at least four 2′-fluoro modifications; (vii) the dsRNA comprises a duplex region of 12-40 nucleotide pairs in length; and (viii) the dsRNA has a blunt end at 5′-end of the antisense strand.

[0384] In some embodiments, the sense strand comprises phosphorothioate internucleotide linkages between nucleotide positions 1 and 2, and between nucleotide positions 2 and 3, the antisense strand comprises phosphorothioate internucleotide linkages between nucleotide positions 1 and 2, between nucleotide positions 2 and 3, between nucleotide positions 21 and 22, and between nucleotide positions 22 and 23, wherein the antisense strand contains at least one thermally destabilizing modification of the duplex located in the seed region of the antisense strand (i.e., at position 2-9 of the 5′-end of the antisense strand), and wherein the dsRNA optionally further has at least one (e.g., one, two, three, four, five, six or all seven) of the following characteristics: (i) the antisense comprises 2, 3, 4, 5 or 6 2′-fluoro modifications; (ii) the sense strand is conjugated with a ligand; (iii) the sense strand comprises 2, 3, 4 or 5 2′-fluoro modifications; (iv) the sense strand comprises 3, 4 or 5 phosphorothioate internucleotide linkages; (v) the dsRNA comprises at least four 2′-fluoro modifications; (vi) the dsRNA comprises a duplex region of 12-40 nucleotide pairs in length; and (vii) the dsRNA has a blunt end at 5′-end of the antisense strand.

[0385] In some embodiments, the dsRNA molecule of the disclosure comprises mismatch(es) with the target, within the duplex, or combinations thereof. The mismatch can occur in the overhang region or the duplex region. The base pair can be ranked on the basis of their propensity to promote dissociation or melting (e.g., on the free energy of association or dissociation of a particular pairing, the simplest approach is to examine the pairs on an individual pair basis, though next neighbor or similar analysis can also be used). In terms of promoting dissociation: A:U is preferred over G:C; G:U is preferred over G:C; and I:C is preferred over G:C (I=inosine). Mismatches, e.g., non-canonical or other than canonical pairings (as described elsewhere herein) are preferred over canonical (A:T, A:U, G:C) pairings; and pairings which include a universal base are preferred over canonical pairings.

[0386] In some embodiments, the dsRNA molecule of the disclosure comprises at least one of the first 1, 2, 3, 4, or 5 base pairs within the duplex regions from the 5′-end of the antisense strand can be chosen independently from the group of: A:U, G:U, I:C, and mismatched pairs, e.g., non-canonical or other than canonical pairings or pairings which include a universal base, to promote the dissociation of the antisense strand at the 5′-end of the duplex.

[0387] In some embodiments, the nucleotide at the 1 position within the duplex region from the 5′-end in the antisense strand is selected from the group consisting of A, dA, dU, U, and dT. Alternatively, at least one of the first 1, 2 or 3 base pair within the duplex region from the 5′-end of the antisense strand is an AU base pair. For example, the first base pair within the duplex region from the 5′-end of the antisense strand is an AU base pair.

[0388] It was found that introducing 4′-modified or 5′-modified nucleotide to the 3′-end of a phosphodiester (PO), phosphorothioate (PS), or phosphorodithioate (PS2) linkage of a dinucleotide at any position of single stranded or double stranded oligonucleotide can exert steric effect to the internucleotide linkage and, hence, protecting or stabilizing it against nucleases.

[0389] In some embodiments, 5′-modified nucleoside is introduced at the 3′-end of a dinucleotide at any position of single stranded or double stranded siRNA. For instance, a 5′-alkylated nucleoside may be introduced at the 3′-end of a dinucleotide at any position of single stranded or double stranded siRNA. The alkyl group at the 5′ position of the ribose sugar can be racemic or chirally pure R or S isomer. An exemplary 5′-alkylated nucleoside is 5′-methyl nucleoside. The 5′-methyl can be either racemic or chirally pure R or S isomer.

[0390] In some embodiments, 4′-modified nucleoside is introduced at the 3′-end of a dinucleotide at any position of single stranded or double stranded siRNA. For instance, a 4′-alkylated nucleoside may be introduced at the 3′-end of a dinucleotide at any position of single stranded or double stranded siRNA. The alkyl group at the 4′ position of the ribose sugar can be racemic or chirally pure R or S isomer. An exemplary 4′-alkylated nucleoside is 4′-methyl nucleoside. The 4′-methyl can be either racemic or chirally pure R or S isomer. Alternatively, a 4′-O-alkylated nucleoside may be introduced at the 3′-end of a dinucleotide at any position of single stranded or double stranded siRNA. The 4′-O-alkyl of the ribose sugar can be racemic or chirally pure R or S isomer. An exemplary 4′-O-alkylated nucleoside is 4′-O-methyl nucleoside. The 4′-O-methyl can be either racemic or chirally pure R or S isomer.

[0391] In some embodiments, 5′-alkylated nucleoside is introduced at any position on the sense strand or antisense strand of a dsRNA, and such modification maintains or improves potency of the dsRNA. The 5′-alkyl can be either racemic or chirally pure R or S isomer. An exemplary 5′-alkylated nucleoside is 5′-methyl nucleoside. The 5′-methyl can be either racemic or chirally pure R or S isomer.

[0392] In some embodiments, 4′-alkylated nucleoside is introduced at any position on the sense strand or antisense strand of a dsRNA, and such modification maintains or improves potency of the dsRNA. The 4′-alkyl can be either racemic or chirally pure R or S isomer. An exemplary 4′-alkylated nucleoside is 4′-methyl nucleoside. The 4′-methyl can be either racemic or chirally pure R or S isomer.

[0393] In some embodiments, 4′-O-alkylated nucleoside is introduced at any position on the sense strand or antisense strand of a dsRNA, and such modification maintains or improves potency of the dsRNA. The 5′-alkyl can be either racemic or chirally pure R or S isomer. An exemplary 4′-O-alkylated nucleoside is 4′-O-methyl nucleoside. The 4′-O-methyl can be either racemic or chirally pure R or S isomer.

[0394] In some embodiments, the dsRNA molecule of the disclosure can comprise 2′-5′ linkages (with 2′-H, 2′-OH and 2′-OMe and with P═O or P═S). For example, the 2′-5′ linkages modifications can be used to promote nuclease resistance or to inhibit binding of the sense to the antisense strand, or can be used at the 5′ end of the sense strand to avoid sense strand activation by RISC.

[0395] In another embodiment, the dsRNA molecule of the disclosure can comprise L sugars (e.g., L ribose, L-arabinose with 2′-H, 2′-OH and 2′-OMe). For example, these L sugars modifications can be used to promote nuclease resistance or to inhibit binding of the sense to the antisense strand, or can be used at the 5′ end of the sense strand to avoid sense strand activation by RISC.

[0396] Various publications describe multimeric siRNA which can all be used with the dsRNA of the disclosure. Such publications include WO2007/091269, U.S. Pat. No. 7,858,769, WO2010/141511, WO2007/117686, WO2009/014887, and WO2011/031520 which are hereby incorporated by their entirely.

[0397] As described in more detail below, the RNAi agent that contains conjugations of one or more carbohydrate moieties to an RNAi agent can optimize one or more properties of the RNAi agent. In many cases, the carbohydrate moiety will be attached to a modified subunit of the RNAi agent. For example, the ribose sugar of one or more ribonucleotide subunits of a dsRNA agent can be replaced with another moiety, e.g., a non-carbohydrate (optionally cyclic) carrier to which is attached a carbohydrate ligand. A ribonucleotide subunit in which the ribose sugar of the subunit has been so replaced is referred to herein as a ribose replacement modification subunit. A cyclic carrier may be a carbocyclic ring system, i.e., all ring atoms are carbon atoms, or a heterocyclic ring system, i.e., one or more ring atoms may be a heteroatom, e.g., nitrogen, oxygen, sulfur. The cyclic carrier may be a monocyclic ring system, or may contain two or more rings, e.g. fused rings. The cyclic carrier may be a fully saturated ring system, or it may contain one or more double bonds.

[0398] The ligand may be attached to the polynucleotide via a carrier. The carriers include (i) at least one “backbone attachment point,” optionally two “backbone attachment points” and (ii) at least one “tethering attachment point.” A “backbone attachment point” as used herein refers to a functional group, e.g. a hydroxyl group, or generally, a bond available for, and that is suitable for incorporation of the carrier into the backbone, e.g., the phosphate, or modified phosphate, e.g., sulfur containing, backbone, of a ribonucleic acid. A “tethering attachment point” (TAP) in some embodiments refers to a constituent ring atom of the cyclic carrier, e.g., a carbon atom or a heteroatom (distinct from an atom which provides a backbone attachment point), that connects a selected moiety. The moiety can be, e.g., a carbohydrate, e.g. monosaccharide, disaccharide, trisaccharide, tetrasaccharide, oligosaccharide and polysaccharide. Optionally, the selected moiety is connected by an intervening tether to the cyclic carrier. Thus, the cyclic carrier will often include a functional group, e.g., an amino group, or generally, provide a bond, that is suitable for incorporation or tethering of another chemical entity, e.g., a ligand to the constituent ring.

[0399] The RNAi agents may be conjugated to a ligand via a carrier, wherein the carrier can be a cyclic group or an acyclic group. Optionally, the cyclic group is selected from pyrrolidinyl, pyrazolinyl, pyrazolidinyl, imidazolinyl, imidazolidinyl, piperidinyl, piperazinyl, [1,3]dioxolane, oxazolidinyl, isoxazolidinyl, morpholinyl, thiazolidinyl, isothiazolidinyl, quinoxalinyl, pyridazinonyl, tetrahydrofuryl and decalin. Optionally, the acyclic group is selected from serinol backbone and diethanolamine backbone.

[0400] In certain specific embodiments, the RNAi agent for use in the methods of the disclosure is an agent selected from the group of agents listed in any one of Tables 2-21. These agents may further comprise a ligand, such as one or more lipophilic moieties, one or more GalNAc derivatives, or both of one of more lipophilic moieties and one or more GalNAc derivatives.

III. iRNAs Conjugated to Ligands

[0401] Another modification of the RNA of an iRNA of the disclosure involves chemically linking to the iRNA one or more ligands, moieties or conjugates that enhance the activity, cellular distribution or cellular uptake of the iRNA, e.g., into a cell. Such moieties include but are not limited to lipid moieties such as a cholesterol moiety (Letsinger et al., Proc. Natl. Acid. Sci. USA, 1989, 86: 6553-6556), cholic acid (Manoharan et al., Biorg. Med. Chem. Let., 1994, 4: 1053-1060), a thioether, e.g., beryl-S-tritylthiol (Manoharan et al., Ann. N.Y. Acad. Sci., 1992, 660: 306-309; Manoharan et al., Biorg. Med. Chem. Let., 1993, 3: 2765-2770), a thiocholesterol (Oberhauser et al., Nucl. Acids Res., 1992, 20: 533-538), an aliphatic chain, e.g., dodecandiol or undecyl residues (Saison-Behmoaras et al., EMBO J, 1991, 10: 1111-1118; Kabanov et al., FEBS Lett., 1990, 259: 327-330; Svinarchuk et al., Biochimie, 1993, 75: 49-54), a phospholipid, e.g., di-hexadecyl-rac-glycerol or triethyl-ammonium 1,2-di-O-hexadecyl-rac-glycero-3-phosphonate (Manoharan et al., Tetrahedron Lett., 1995, 36: 3651-3654; Shea et al., Nucl. Acids Res., 1990, 18: 3777-3783), a polyamine or a polyethylene glycol chain (Manoharan et al., Nucleosides & Nucleotides, 1995, 14: 969-973), or adamantane acetic acid (Manoharan et al., Tetrahedron Lett., 1995, 36: 3651-3654), a palmityl moiety (Mishra et al., Biochim. Biophys. Acta, 1995, 1264: 229-237), or an octadecylamine or hexylamino-carbonyloxycholesterol moiety (Crooke et al., J. Pharmacol. Exp. Ther., 1996, 277: 923-937).

[0402] In certain embodiments, a ligand alters the distribution, targeting or lifetime of an iRNA agent into which it is incorporated. In some embodiments, a ligand provides an enhanced affinity for a selected target, e.g., molecule, cell or cell type, compartment, e.g., a cellular or organ compartment, tissue, organ or region of the body, as, e.g., compared to a species absent such a ligand. Typical ligands will not take part in duplex pairing in a duplexed nucleic acid.

[0403] Ligands can include a naturally occurring substance, such as a protein (e.g., human serum albumin (HSA), low-density lipoprotein (LDL), or globulin); carbohydrate (e.g., a dextran, pullulan, chitin, chitosan, inulin, cyclodextrin or hyaluronic acid); or a lipid. The ligand may also be a recombinant or synthetic molecule, such as a synthetic polymer, e.g., a synthetic polyamino acid. Examples of polyamino acids include polyamino acid is a polylysine (PLL), poly L-aspartic acid, poly L-glutamic acid, styrene-maleic acid anhydride copolymer, poly(L-lactide-co-glycolied) copolymer, divinyl ether-maleic anhydride copolymer, N-(2-hydroxypropyl)methacrylamide copolymer (HMPA), polyethylene glycol (PEG), polyvinyl alcohol (PVA), polyurethane, poly(2-ethylacryllic acid), N-isopropylacrylamide polymers, or polyphosphazine. Example of polyamines include: polyethylenimine, polylysine (PLL), spermine, spermidine, polyamine, pseudopeptide-polyamine, peptidomimetic polyamine, dendrimer polyamine, arginine, amidine, protamine, cationic lipid, cationic porphyrin, quaternary salt of a polyamine, or an a helical peptide.

[0404] Ligands can also include targeting groups, e.g., a cell or tissue targeting agent, e.g., a lectin, glycoprotein, lipid or protein, e.g., an antibody, that binds to a specified cell type such as a kidney cell. A targeting group can be a thyrotropin, melanotropin, lectin, glycoprotein, surfactant protein A, Mucin carbohydrate, multivalent lactose, multivalent galactose, N-acetyl-galactosamine, N-acetyl-glucosamine multivalent mannose, multivalent fucose, glycosylated polyaminoacids, multivalent galactose, transferrin, bisphosphonate, polyglutamate, polyaspartate, a lipid, cholesterol, a steroid, bile acid, folate, vitamin B12, biotin, or an RGD peptide or RGD peptide mimetic. In certain embodiments, the ligand is a multivalent galactose, e.g., an N-acetyl-galactosamine.

[0405] Other examples of ligands include dyes, intercalating agents (e.g. acridines), cross-linkers (e.g. psoralene, mitomycin C), porphyrins (TPPC4, texaphyrin, Sapphyrin), polycyclic aromatic hydrocarbons (e.g., phenazine, dihydrophenazine), artificial endonucleases (e.g. EDTA), lipophilic molecules, e.g., cholesterol, cholic acid, adamantane acetic acid, 1-pyrene butyric acid, dihydrotestosterone, 1,3-Bis-O(hexadecyl)glycerol, geranyloxyhexyl group, hexadecylglycerol, borneol, menthol, 1,3-propanediol, heptadecyl group, palmitic acid, myristic acid,O3-(oleoyl)lithocholic acid, O3-(oleoyl)cholenic acid, dimethoxytrityl, or phenoxazine) and peptide conjugates (e.g., antennapedia peptide, Tat peptide), alkylating agents, phosphate, amino, mercapto, PEG (e.g., PEG-40K), MPEG, [MPEG]₂, polyamino, alkyl, substituted alkyl, radiolabeled markers, enzymes, haptens (e.g. biotin), transport/absorption facilitators (e.g., aspirin, vitamin E, folic acid), synthetic ribonucleases (e.g., imidazole, bisimidazole, histamine, imidazole clusters, acridine-imidazole conjugates, Eu3+ complexes of tetraazamacrocycles), dinitrophenyl, HRP, or AP.

[0406] Ligands can be proteins, e.g., glycoproteins, or peptides, e.g., molecules having a specific affinity for a co-ligand, or antibodies e.g., an antibody, that binds to a specified cell type such as a cancer cell, endothelial cell, or bone cell. Ligands may also include hormones and hormone receptors. They can also include non-peptidic species, such as lipids, lectins, carbohydrates, vitamins, cofactors, multivalent lactose, multivalent galactose, N-acetyl-galactosamine, N-acetyl-glucosamine multivalent mannose, or multivalent fucose. The ligand can be, for example, a lipopolysaccharide, an activator of p38 MAP kinase, or an activator of NF-κB.

[0407] The ligand can be a substance, e.g., a drug, which can increase the uptake of the iRNA agent into the cell, for example, by disrupting the cell's cytoskeleton, e.g., by disrupting the cell's microtubules, microfilaments, or intermediate filaments. The drug can be, for example, taxon, vincristine, vinblastine, cytochalasin, nocodazole, japlakinolide, latrunculin A, phalloidin, swinholide A, indanocine, or myoservin.

[0408] In some embodiments, a ligand attached to an iRNA as described herein acts as a pharmacokinetic modulator (PK modulator). PK modulators include lipophiles, bile acids, steroids, phospholipid analogues, peptides, protein binding agents, PEG, vitamins etc. Exemplary PK modulators include, but are not limited to, cholesterol, fatty acids, cholic acid, lithocholic acid, dialkylglycerides, diacylglyceride, phospholipids, sphingolipids, naproxen, ibuprofen, vitamin E, biotin etc. Oligonucleotides that comprise a number of phosphorothioate linkages are also known to bind to serum protein, thus short oligonucleotides, e.g., oligonucleotides of about 5 bases, 10 bases, 15 bases or 20 bases, comprising multiple of phosphorothioate linkages in the backbone are also amenable to the present disclosure as ligands (e.g. as PK modulating ligands). In addition, aptamers that bind serum components (e.g. serum proteins) are also suitable for use as PK modulating ligands in the embodiments described herein.

[0409] Ligand-conjugated iRNAs of the disclosure may be synthesized by the use of an oligonucleotide that bears a pendant reactive functionality, such as that derived from the attachment of a linking molecule onto the oligonucleotide (described below). This reactive oligonucleotide may be reacted directly with commercially-available ligands, ligands that are synthesized bearing any of a variety of protecting groups, or ligands that have a linking moiety attached thereto.

[0410] The oligonucleotides used in the conjugates of the present disclosure may be conveniently and routinely made through the well-known technique of solid-phase synthesis. Equipment for such synthesis is sold by several vendors including, for example, Applied Biosystems® (Foster City, Calif.). Any other means for such synthesis known in the art may additionally or alternatively be employed. It is also known to use similar techniques to prepare other oligonucleotides, such as the phosphorothioates and alkylated derivatives.

[0411] In the ligand-conjugated oligonucleotides and ligand-molecule bearing sequence-specific linked nucleosides of the present disclosure, the oligonucleotides and oligonucleosides may be assembled on a suitable DNA synthesizer utilizing standard nucleotide or nucleoside precursors, or nucleotide or nucleoside conjugate precursors that already bear the linking moiety, ligand-nucleotide or nucleoside-conjugate precursors that already bear the ligand molecule, or non-nucleoside ligand-bearing building blocks.

[0412] When using nucleotide-conjugate precursors that already bear a linking moiety, the synthesis of the sequence-specific linked nucleosides is typically completed, and the ligand molecule is then reacted with the linking moiety to form the ligand-conjugated oligonucleotide. In some embodiments, the oligonucleotides or linked nucleosides of the present disclosure are synthesized by an automated synthesizer using phosphoramidites derived from ligand-nucleoside conjugates in addition to the standard phosphoramidites and non-standard phosphoramidites that are commercially available and routinely used in oligonucleotide synthesis.

### A. Lipid Conjugates

[0413] In certain embodiments, the ligand or conjugate is a lipid or lipid-based molecule. Such a lipid or lipid-based molecule can typically bind a serum protein, such as human serum albumin (HSA). An HSA binding ligand allows for distribution of the conjugate to a target tissue, e.g., a non-kidney target tissue of the body. For example, the target tissue can be the liver, including parenchymal cells of the liver. Other molecules that can bind HSA can also be used as ligands. For example, naproxen or aspirin can be used. A lipid or lipid-based ligand can (a) increase resistance to degradation of the conjugate, (b) increase targeting or transport into a target cell or cell membrane, or (c) can be used to adjust binding to a serum protein, e.g., HSA.

[0414] A lipid-based ligand can be used to modulate, e.g., control (e.g., inhibit) the binding of the conjugate to a target tissue. For example, a lipid or lipid-based ligand that binds to HSA more strongly will be less likely to be targeted to the kidney and therefore less likely to be cleared from the body. A lipid or lipid-based ligand that binds to HSA less strongly can be used to target the conjugate to the kidney.

[0415] In certain embodiments, the lipid-based ligand binds HSA. For example, the ligand can bind HSA with a sufficient affinity such that distribution of the conjugate to a non-kidney tissue is enhanced. However, the affinity is typically not so strong that the HSA-ligand binding cannot be reversed.

[0416] In certain embodiments, the lipid-based ligand binds HSA weakly or not at all, such that distribution of the conjugate to the kidney is enhanced. Other moieties that target to kidney cells can also be used in place of or in addition to the lipid-based ligand.

[0417] In another aspect, the ligand is a moiety, e.g., a vitamin, which is taken up by a target cell, e.g., a proliferating cell. These are particularly useful for treating disorders characterized by unwanted cell proliferation, e.g., of the malignant or non-malignant type, e.g., cancer cells. Exemplary vitamins include vitamin A, E, and K. Other exemplary vitamins include are B vitamin, e.g., folic acid, B12, riboflavin, biotin, pyridoxal or other vitamins or nutrients taken up by cancer cells. Also included are HSA and low density lipoprotein (LDL).

### B. Cell Permeation Agents

[0418] In another aspect, the ligand is a cell-permeation agent, such as a helical cell-permeation agent. In certain embodiments, the agent is amphipathic. An exemplary agent is a peptide such as tat or antennopedia. If the agent is a peptide, it can be modified, including a peptidylmimetic, invertomers, non-peptide or pseudo-peptide linkages, and use of D-amino acids. The helical agent is typically an α-helical agent and can have a lipophilic and a lipophobic phase.

[0419] The ligand can be a peptide or peptidomimetic. A peptidomimetic (also referred to herein as an oligopeptidomimetic) is a molecule capable of folding into a defined three-dimensional structure similar to a natural peptide. The attachment of peptide and peptidomimetics to iRNA agents can affect pharmacokinetic distribution of the iRNA, such as by enhancing cellular recognition and absorption. The peptide or peptidomimetic moiety can be about 5-50 amino acids long, e.g., about 5, 10, 15, 20, 25, 30, 35, 40, 45, or 50 amino acids long.

[0420] A peptide or peptidomimetic can be, for example, a cell permeation peptide, cationic peptide, amphipathic peptide, or hydrophobic peptide (e.g., consisting primarily of Tyr, Trp, or Phe). The peptide moiety can be a dendrimer peptide, constrained peptide or crosslinked peptide. In another alternative, the peptide moiety can include a hydrophobic membrane translocation sequence (MTS). An exemplary hydrophobic MTS-containing peptide is RFGF having the amino acid sequence AAVALLPAVLLALLAP (SEQ ID NO: 16). An RFGF analogue (e.g., amino acid sequence AALLPVLLAAP (SEQ ID NO: 17)) containing a hydrophobic MTS can also be a targeting moiety. The peptide moiety can be a “delivery” peptide, which can carry large polar molecules including peptides, oligonucleotides, and protein across cell membranes. For example, sequences from the HIV Tat protein (GRKKRRQRRRPPQ (SEQ ID NO: 18)) and the Drosophila Antennapedia protein (RQIKIWFQNRRMKWKK (SEQ ID NO: 19)) have been found to be capable of functioning as delivery peptides. A peptide or peptidomimetic can be encoded by a random sequence of DNA, such as a peptide identified from a phage-display library, or one-bead-one-compound (OBOC) combinatorial library (Lam et al., Nature, 354: 82-84, 1991). Typically, the peptide or peptidomimetic tethered to a dsRNA agent via an incorporated monomer unit is a cell targeting peptide such as an arginine-glycine-aspartic acid (RGD)-peptide, or RGD mimic. A peptide moiety can range in length from about 5 amino acids to about 40 amino acids. The peptide moieties can have a structural modification, such as to increase stability or direct conformational properties. Any of the structural modifications described below can be utilized.

[0421] An RGD peptide for use in the compositions and methods of the disclosure may be linear or cyclic, and may be modified, e.g., glycosylated or methylated, to facilitate targeting to a specific tissue(s). RGD-containing peptides and peptidiomimemtics may include D-amino acids, as well as synthetic RGD mimics. In addition to RGD, one can use other moieties that target the integrin ligand. Preferred conjugates of this ligand target PECAM-1 or VEGF.

[0422] An RGD peptide moiety can be used to target a particular cell type, e.g., a tumor cell, such as an endothelial tumor cell or a breast cancer tumor cell (Zitzmann et al., Cancer Res., 62: 5139-43, 2002). An RGD peptide can facilitate targeting of a dsRNA agent to tumors of a variety of other tissues, including the lung, kidney, spleen, or liver (Aoki et al., Cancer Gene Therapy 8: 783-787, 2001). Typically, the RGD peptide will facilitate targeting of an iRNA agent to the kidney. The RGD peptide can be linear or cyclic, and can be modified, e.g., glycosylated or methylated to facilitate targeting to specific tissues. For example, a glycosylated RGD peptide can deliver an iRNA agent to a tumor cell expressing αvß₃ (Haubner et al., Jour. Nucl. Med., 42: 326-336, 2001).

[0423] A “cell permeation peptide” is capable of permeating a cell, e.g., a microbial cell, such as a bacterial or fungal cell, or a mammalian cell, such as a human cell. A microbial cell-permeating peptide can be, for example, an α-helical linear peptide (e.g., LL-37 or Ceropin P1), a disulfide bond-containing peptide (e.g., α-defensin, β-defensin or bactenecin), or a peptide containing only one or two dominating amino acids (e.g., PR-39 or indolicidin). A cell permeation peptide can also include a nuclear localization signal (NLS). For example, a cell permeation peptide can be a bipartite amphipathic peptide, such as MPG, which is derived from the fusion peptide domain of HIV-1 gp41 and the NLS of SV40 large T antigen (Simeoni et al., Nucl. Acids Res. 31: 2717-2724, 2003).

### C. Carbohydrate Conjugates

[0424] In some embodiments of the compositions and methods of the disclosure, an iRNA further comprises a carbohydrate. The carbohydrate conjugated iRNA are advantageous for the in vivo delivery of nucleic acids, as well as compositions suitable for in vivo therapeutic use, as described herein. As used herein, “carbohydrate” refers to a compound which is either a carbohydrate per se made up of one or more monosaccharide units having at least 6 carbon atoms (which can be linear, branched or cyclic) with an oxygen, nitrogen or sulfur atom bonded to each carbon atom; or a compound having as a part thereof a carbohydrate moiety made up of one or more monosaccharide units each having at least six carbon atoms (which can be linear, branched or cyclic), with an oxygen, nitrogen or sulfur atom bonded to each carbon atom. Representative carbohydrates include the sugars (mono-, di-, tri- and oligosaccharides containing from about 4, 5, 6, 7, 8, or 9 monosaccharide units), and polysaccharides such as starches, glycogen, cellulose and polysaccharide gums. Specific monosaccharides include C5 and above (e.g., C5, C6, C7, or C8) sugars; di- and tri-saccharides include sugars having two or three monosaccharide units (e.g., C5, C6, C7, or C8).

[0425] In certain embodiments, a carbohydrate conjugate comprises a monosaccharide.

[0426] In certain embodiments, the monosaccharide is an N-acetylgalactosamine (GalNAc). GalNAc conjugates, which comprise one or more N-acetylgalactosamine (GalNAc) derivatives, are described, for example, in U.S. Pat. No. 8,106,022, the entire content of which is hereby incorporated herein by reference. In some embodiments, the GalNAc conjugate serves as a ligand that targets the iRNA to particular cells. In some embodiments, the GalNAc conjugate targets the iRNA to liver cells, e.g., by serving as a ligand for the asialoglycoprotein receptor of liver cells (e.g., hepatocytes).

[0427] In some embodiments, the carbohydrate conjugate comprises one or more GalNAc derivatives. The GalNAc derivatives may be attached via a linker, e.g., a bivalent or trivalent branched linker. In some embodiments the GalNAc conjugate is conjugated to the 3′ end of the sense strand. In some embodiments, the GalNAc conjugate is conjugated to the iRNA agent (e.g., to the 3′ end of the sense strand) via a linker, e.g., a linker as described herein. In some embodiments the GalNAc conjugate is conjugated to the 5′ end of the sense strand. In some embodiments, the GalNAc conjugate is conjugated to the iRNA agent (e.g., to the 5′ end of the sense strand) via a linker, e.g., a linker as described herein.

[0428] In certain embodiments of the disclosure, the GalNAc or GalNAc derivative is attached to an iRNA agent of the disclosure via a monovalent linker. In some embodiments, the GalNAc or GalNAc derivative is attached to an iRNA agent of the disclosure via a bivalent linker. In yet other embodiments of the disclosure, the GalNAc or GalNAc derivative is attached to an iRNA agent of the disclosure via a trivalent linker. In other embodiments of the disclosure, the GalNAc or GalNAc derivative is attached to an iRNA agent of the disclosure via a tetravalent linker.

[0429] In certain embodiments, the double stranded RNAi agents of the disclosure comprise one GalNAc or GalNAc derivative attached to the iRNA agent. In certain embodiments, the double stranded RNAi agents of the disclosure comprise a plurality (e.g., 2, 3, 4, 5, or 6) GalNAc or GalNAc derivatives, each independently attached to a plurality of nucleotides of the double stranded RNAi agent through a plurality of monovalent linkers.

[0430] In some embodiments, for example, when the two strands of an iRNA agent of the disclosure are part of one larger molecule connected by an uninterrupted chain of nucleotides between the 3′-end of one strand and the 5′-end of the respective other strand forming a hairpin loop comprising, a plurality of unpaired nucleotides, each unpaired nucleotide within the hairpin loop may independently comprise a GalNAc or GalNAc derivative attached via a monovalent linker. The hairpin loop may also be formed by an extended overhang in one strand of the duplex.

[0431] In some embodiments, for example, when the two strands of an iRNA agent of the disclosure are part of one larger molecule connected by an uninterrupted chain of nucleotides between the 3′-end of one strand and the 5′-end of the respective other strand forming a hairpin loop comprising, a plurality of unpaired nucleotides, each unpaired nucleotide within the hairpin loop may independently comprise a GalNAc or GalNAc derivative attached via a monovalent linker. The hairpin loop may also be formed by an extended overhang in one strand of the duplex.

[0432] In some embodiments, the GalNAc conjugate is

[chemical structure]

[0433] In some embodiments, the RNAi agent is attached to the carbohydrate conjugate via a linker as shown in the following schematic, wherein X is O or S

[chemical structure]

[0434] In some embodiments, the RNAi agent is conjugated to L96 as defined in Table 1 and shown below.

[chemical structure]

[0435] In certain embodiments, a carbohydrate conjugate for use in the compositions and methods of the disclosure is selected from the group consisting of:

[chemical structure]

[chemical structure]

[chemical structure]

[chemical structure]

[chemical structure]

[chemical structure]

[chemical structure]

[0436] In certain embodiments, a carbohydrate conjugate for use in the compositions and methods of the disclosure is a monosaccharide. In certain embodiments, the monosaccharide is an N-acetylgalactosamine, such as

[chemical structure]

[0437] Another representative carbohydrate conjugate for use in the embodiments described herein includes, but is not limited to,

[chemical structure]

when one of X or Y is an oligonucleotide, the other is a hydrogen.

[0438] In some embodiments, a suitable ligand is a ligand disclosed in WO 2019/055633, the entire contents of which are incorporated herein by reference. In one embodiment the ligand comprises the structure below.

[chemical structure]

[0439] In certain embodiments, the RNAi agents of the disclosure may include GalNAc ligands, even if such GalNAc ligands are currently projected to be of limited value for the preferred intrathecal/CNS delivery route(s) of the instant disclosure.

[0440] In certain embodiments of the disclosure, the GalNAc or GalNAc derivative is attached to an iRNA agent of the disclosure via a monovalent linker. In some embodiments, the GalNAc or GalNAc derivative is attached to an iRNA agent of the disclosure via a bivalent linker. In yet other embodiments of the disclosure, the GalNAc or GalNAc derivative is attached to an iRNA agent of the disclosure via a trivalent linker. In other embodiments of the disclosure, the GalNAc or GalNAc derivative is attached to an iRNA agent of the disclosure via a tetravalent linker.

[0441] In certain embodiments, the double stranded RNAi agents of the disclosure comprise one GalNAc or GalNAc derivative attached to the iRNA agent, e.g., the 5′end of the sense strand of a dsRNA agent, or the 5′ end of one or both sense strands of a dual targeting RNAi agent as described herein. In certain embodiments, the double stranded RNAi agents of the disclosure comprise a plurality (e.g., 2, 3, 4, 5, or 6) GalNAc or GalNAc derivatives, each independently attached to a plurality of nucleotides of the double stranded RNAi agent through a plurality of monovalent linkers.

[0442] In some embodiments, for example, when the two strands of an iRNA agent of the disclosure are part of one larger molecule connected by an uninterrupted chain of nucleotides between the 3′-end of one strand and the 5′-end of the respective other strand forming a hairpin loop comprising, a plurality of unpaired nucleotides, each unpaired nucleotide within the hairpin loop may independently comprise a GalNAc or GalNAc derivative attached via a monovalent linker.

[0443] In some embodiments, the carbohydrate conjugate further comprises one or more additional ligands as described above, such as, but not limited to, a PK modulator or a cell permeation peptide.

[0444] Additional carbohydrate conjugates and linkers suitable for use in the present disclosure include those described in WO 2014/179620 and WO 2014/179627, the entire contents of each of which are incorporated herein by reference.

### D. Linkers

[0445] In some embodiments, the conjugate or ligand described herein can be attached to an iRNA oligonucleotide with various linkers that can be cleavable or non-cleavable.

[0446] The term “linker” or “linking group” means an organic moiety that connects two parts of a compound, e.g., covalently attaches two parts of a compound. Linkers typically comprise a direct bond or an atom such as oxygen or sulfur, a unit such as NR8, C(O), C(O)NH, SO, SO₂, SO₂NH or a chain of atoms, such as, but not limited to, substituted or unsubstituted alkyl, substituted or unsubstituted alkenyl, substituted or unsubstituted alkynyl, arylalkyl, arylalkenyl, arylalkynyl, heteroarylalkyl, heteroarylalkenyl, heteroarylalkynyl, heterocyclylalkyl, heterocyclylalkenyl, heterocyclylalkynyl, aryl, heteroaryl, heterocyclyl, cycloalkyl, cycloalkenyl, alkylarylalkyl, alkylarylalkenyl, alkylarylalkynyl, alkenylarylalkyl, alkenylarylalkenyl, alkenylarylalkynyl, alkynylarylalkyl, alkynylarylalkenyl, alkynylarylalkynyl, alkylheteroarylalkyl, alkylheteroarylalkenyl, alkylheteroarylalkynyl, alkenylheteroarylalkyl, alkenylheteroarylalkenyl, alkenylheteroarylalkynyl, alkynylheteroarylalkyl, alkynylheteroarylalkenyl, alkynylheteroarylalkynyl, alkylheterocyclylalkyl, alkylheterocyclylalkenyl, alkylhererocyclylalkynyl, alkenylheterocyclylalkyl, alkenylheterocyclylalkenyl, alkenylheterocyclylalkynyl, alkynylheterocyclylalkyl, alkynylheterocyclylalkenyl, alkynylheterocyclylalkynyl, alkylaryl, alkenylaryl, alkynylaryl, alkylheteroaryl, alkenylheteroaryl, alkynylhereroaryl, which one or more methylenes can be interrupted or terminated by O, S, S(O), SO₂, N(R8), C(O), substituted or unsubstituted aryl, substituted or unsubstituted heteroaryl, substituted or unsubstituted heterocyclic; where R8 is hydrogen, acyl, aliphatic or substituted aliphatic. In certain embodiments, the linker is of a length of about 1-24 atoms, 2-24, 3-24, 4-24, 5-24, 6-24, 6-18, 7-18, 8-18 atoms, 7-17, 8-17, 6-16, 7-16, or 8-16 atoms.

[0447] A cleavable linking group is one which is sufficiently stable outside the cell, but which upon entry into a target cell is cleaved to release the two parts the linker is holding together. In a preferred embodiment, the cleavable linking group is cleaved at least about 10 times, 20, times, 30 times, 40 times, 50 times, 60 times, 70 times, 80 times, 90 times or more, or at least about 100 times faster in a target cell or under a first reference condition (which can, e.g., be selected to mimic or represent intracellular conditions) than in the blood of a subject, or under a second reference condition (which can, e.g., be selected to mimic or represent conditions found in the blood or serum).

[0448] Cleavable linking groups are susceptible to cleavage agents, e.g., pH, redox potential or the presence of degradative molecules. Generally, cleavage agents are more prevalent or found at higher levels or activities inside cells than in serum or blood. Examples of such degradative agents include: redox agents which are selected for particular substrates or which have no substrate specificity, including, e.g., oxidative or reductive enzymes or reductive agents such as mercaptans, present in cells, that can degrade a redox cleavable linking group by reduction; esterases; endosomes or agents that can create an acidic environment, e.g., those that result in a pH of five or lower; enzymes that can hydrolyze or degrade an acid cleavable linking group by acting as a general acid, peptidases (which can be substrate specific), and phosphatases.

[0449] A cleavable linkage group, such as a disulfide bond can be susceptible to pH. The pH of human serum is 7.4, while the average intracellular pH is slightly lower, ranging from about 7.1-7.3. Endosomes have a more acidic pH, in the range of 5.5-6.0, and lysosomes have an even more acidic pH at around 5.0. Some linkers will have a cleavable linking group that is cleaved at a preferred pH, thereby releasing a cationic lipid from the ligand inside the cell, or into the desired compartment of the cell.

[0450] A linker can include a cleavable linking group that is cleavable by a particular enzyme. The type of cleavable linking group incorporated into a linker can depend on the cell to be targeted. For example, a liver-targeting ligand can be linked to a cationic lipid through a linker that includes an ester group. Liver cells are rich in esterases, and therefore the linker will be cleaved more efficiently in liver cells than in cell types that are not esterase-rich. Other cell-types rich in esterases include cells of the lung, renal cortex, and testis.

[0451] Linkers that contain peptide bonds can be used when targeting cell types rich in peptidases, such as liver cells and synoviocytes.

[0452] In general, the suitability of a candidate cleavable linking group can be evaluated by testing the ability of a degradative agent (or condition) to cleave the candidate linking group. It will also be desirable to also test the candidate cleavable linking group for the ability to resist cleavage in the blood or when in contact with other non-target tissue. Thus, one can determine the relative susceptibility to cleavage between a first and a second condition, where the first is selected to be indicative of cleavage in a target cell and the second is selected to be indicative of cleavage in other tissues or biological fluids, e.g., blood or serum. The evaluations can be carried out in cell free systems, in cells, in cell culture, in organ or tissue culture, or in whole animals. It can be useful to make initial evaluations in cell-free or culture conditions and to confirm by further evaluations in whole animals. In preferred embodiments, useful candidate compounds are cleaved at least about 2, 4, 10, 20, 30, 40, 50, 60, 70, 80, 90, or about 100 times faster in the cell (or under in vitro conditions selected to mimic intracellular conditions) as compared to blood or serum (or under in vitro conditions selected to mimic extracellular conditions).

i. Redox Cleavable Linking Groups

[0453] In certain embodiments, a cleavable linking group is a redox cleavable linking group that is cleaved upon reduction or oxidation. An example of reductively cleavable linking group is a disulphide linking group (—S—S—). To determine if a candidate cleavable linking group is a suitable “reductively cleavable linking group,” or for example is suitable for use with a particular iRNA moiety and particular targeting agent one can look to methods described herein. For example, a candidate can be evaluated by incubation with dithiothreitol (DTT), or other reducing agent using reagents know in the art, which mimic the rate of cleavage which would be observed in a cell, e.g., a target cell. The candidates can also be evaluated under conditions which are selected to mimic blood or serum conditions. In one, candidate compounds are cleaved by at most about 10% in the blood. In other embodiments, useful candidate compounds are degraded at least about 2, 4, 10, 20, 30, 40, 50, 60, 70, 80, 90, or about 100 times faster in the cell (or under in vitro conditions selected to mimic intracellular conditions) as compared to blood (or under in vitro conditions selected to mimic extracellular conditions). The rate of cleavage of candidate compounds can be determined using standard enzyme kinetics assays under conditions chosen to mimic intracellular media and compared to conditions chosen to mimic extracellular media.

ii. Phosphate-Based Cleavable Linking Groups

[0454] In certain embodiments, a cleavable linker comprises a phosphate-based cleavable linking group. A phosphate-based cleavable linking group is cleaved by agents that degrade or hydrolyze the phosphate group. An example of an agent that cleaves phosphate groups in cells are enzymes such as phosphatases in cells. Examples of phosphate-based linking groups are —O—P(O)(ORk)-O—, —O—P(S)(ORk)-O—, —O—P(S)(SRk)-O—, —S—P(O)(ORk)-O—, —O—P(O)(ORk)-S—, —S—P(O)(ORk)-S—, —O—P(S)(ORk)-S—, —S—P(S)(ORk)-O—, —O—P(O)(Rk)-O—, —O—P(S)(Rk)-O—, —S—P(O)(Rk)-O—, —S—P(S)(Rk)-O—, —S—P(O)(Rk)-S—, —O—P(S)(Rk)-S. Preferred embodiments are —O—P(O)(OH)—O—, —O—P(S)(OH)—O—, —O—P(S)(SH)—O—, —S—P(O)(OH)—O—, —O—P(O)(OH)—S—, —S—P(O)(OH)—S—, —O—P(S)(OH)—S—, —S—P(S)(OH)—O—, —O—P(O)(H)—O—, —O—P(S)(H)—O—, —S—P(O)(H)—O, —S—P(S)(H)—O—, —S—P(O)(H)—S—, —O—P(S)(H)—S—. A preferred embodiment is —O—P(O)(OH)—O—. These candidates can be evaluated using methods analogous to those described above.

iii. Acid Cleavable Linking Groups

[0455] In certain embodiments, a cleavable linker comprises an acid cleavable linking group. An acid cleavable linking group is a linking group that is cleaved under acidic conditions. In preferred embodiments acid cleavable linking groups are cleaved in an acidic environment with a pH of about 6.5 or lower (e.g., about 6.0, 5.75, 5.5, 5.25, 5.0, or lower), or by agents such as enzymes that can act as a general acid. In a cell, specific low pH organelles, such as endosomes and lysosomes can provide a cleaving environment for acid cleavable linking groups. Examples of acid cleavable linking groups include but are not limited to hydrazones, esters, and esters of amino acids. Acid cleavable groups can have the general formula —C═NN—, C(O)O, or —OC(O). A preferred embodiment is when the carbon attached to the oxygen of the ester (the alkoxy group) is an aryl group, substituted alkyl group, or tertiary alkyl group such as dimethyl pentyl or t-butyl.

[0456] These candidates can be evaluated using methods analogous to those described above.

iv. Ester-Based Cleavable Linking Groups

[0457] In certain embodiments, a cleavable linker comprises an ester-based cleavable linking group. An ester-based cleavable linking group is cleaved by enzymes such as esterases and amidases in cells. Examples of ester-based cleavable linking groups include but are not limited to esters of alkylene, alkenylene and alkynylene groups. Ester cleavable linking groups have the general formula —C(O)O—, or —OC(O)—. These candidates can be evaluated using methods analogous to those described above.

v. Peptide-Based Cleavable Linking Groups

[0458] In yet another embodiment, a cleavable linker comprises a peptide-based cleavable linking group. A peptide-based cleavable linking group is cleaved by enzymes such as peptidases and proteases in cells. Peptide-based cleavable linking groups are peptide bonds formed between amino acids to yield oligopeptides (e.g., dipeptides, tripeptides etc.) and polypeptides. Peptide-based cleavable groups do not include the amide group (—C(O)NH—). The amide group can be formed between any alkylene, alkenylene or alkynelene. A peptide bond is a special type of amide bond formed between amino acids to yield peptides and proteins. The peptide-based cleavage group is generally limited to the peptide bond (i.e., the amide bond) formed between amino acids yielding peptides and proteins and does not include the entire amide functional group. Peptide-based cleavable linking groups have the general formula —NHCHR_{A}C(O)NHCHR_{B}C(O)—, where R_{A} and R_{B} are the R groups of the two adjacent amino acids. These candidates can be evaluated using methods analogous to those described above.

[0459] In some embodiments, an iRNA of the disclosure is conjugated to a carbohydrate through a linker. Non-limiting examples of iRNA carbohydrate conjugates with linkers of the compositions and methods of the disclosure include, but are not limited to,

[chemical structure]

[chemical structure]

[chemical structure]

when one of X or Y is an oligonucleotide, the other is a hydrogen.

[0460] In certain embodiments of the compositions and methods of the disclosure, a ligand is one or more “GalNAc” (N-acetylgalactosamine) derivatives attached through a bivalent or trivalent branched linker.

[0461] In certain embodiments, a dsRNA of the disclosure is conjugated to a bivalent or trivalent branched linker selected from the group of structures shown in any of formula (XLV)-(XLVI):

[chemical structure]

[0462] wherein:
[0463] q2A, q2B, q3A, q3B, q4A, q4B, q5A, q5B and q5C represent independently for each occurrence 0-20 and wherein the repeating unit can be the same or different;
[0464] P^{2A}, P^{2B}, P^{3A}, P^{3B}, P^{4A}, P^{4B}, P^{5A}, P^{5B}, P^{5C}, T^{2A}, T^{2B}, T^{3A}, T^{3B}, T^{4A}, T^{4B}, T^{4A}, T^{5B}, T^{5C} are each independently for each occurrence absent, CO, NH, O, S, OC(O), NHC(O), CH₂, CH₂NH or CH₂O;
[0465] Q^{2A}, Q^{2B}, Q^{3A}, Q^{3B}, Q^{4A}, Q^{4B}, Q^{5A}, Q^{5B}, Q^{5C} are independently for each occurrence absent, alkylene, substituted alkylene wherein one or more methylenes can be interrupted or terminated by one or more of O, S, S(O), SO₂, N(RN), C(R′)═C(R″), C≡C or C(O);
[0466] R^{2A}, R^{2B}, R^{3A}, R^{3B}, R^{4A}, R^{4B}, R^{5A}, R^{5B}, R^{5C} are each independently for each occurrence absent, NH, O, S, CH₂, C(O)O, C(O)NH, NHCH(R^{a})C(O), —C(O)—CH(R^{a})—NH—, CO, CH═N—O,

[chemical structure]

or heterocyclyl;
[0467] L^{2A}, L^{2B}, L^{3A}, L^{3B}, L^{4A}, L^{4B}, L^{5A}, L^{5B} and L^{5C} represent the ligand; i.e. each independently for each occurrence a monosaccharide (such as GalNAc), disaccharide, trisaccharide, tetrasaccharide, oligosaccharide, or polysaccharide; and R^{a} is H or amino acid side chain. Trivalent conjugating GalNAc derivatives are particularly useful for use with RNAi agents for inhibiting the expression of a target gene, such as those of formula (XLIX):

[chemical structure]

[0468] wherein L^{5A}, L^{5B}, and L^{5C} represent a monosaccharide, such as GalNAc derivative.

[0469] Examples of suitable bivalent and trivalent branched linker groups conjugating GalNAc derivatives include, but are not limited to, the structures recited above as formulas II, VII, XI, X, and XIII.

[0470] Representative U.S. patents that teach the preparation of RNA conjugates include, but are not limited to, U.S. Pat. Nos. 4,828,979; 4,948,882; 5,218,105; 5,525,465; 5,541,313; 5,545,730; 5,552,538; 5,578,717, 5,580,731; 5,591,584; 5,109,124; 5,118,802; 5,138,045; 5,414,077; 5,486,603; 5,512,439; 5,578,718; 5,608,046; 4,587,044; 4,605,735; 4,667,025; 4,762,779; 4,789,737; 4,824,941; 4,835,263; 4,876,335; 4,904,582; 4,958,013; 5,082,830; 5,112,963; 5,214,136; 5,082,830; 5,112,963; 5,214,136; 5,245,022; 5,254,469; 5,258,506; 5,262,536; 5,272,250; 5,292,873; 5,317,098; 5,371,241, 5,391,723; 5,416,203, 5,451,463; 5,510,475; 5,512,667; 5,514,785; 5,565,552; 5,567,810; 5,574,142; 5,585,481; 5,587,371; 5,595,726; 5,597,696; 5,599,923; 5,599,928; 5,688,941; 6,294,664; 6,320,017; 6,576,752; 6,783,931; 6,900,297; 7,037,646; and 8,106,022, the entire contents of each of which are hereby incorporated herein by reference.

[0471] It is not necessary for all positions in a given compound to be uniformly modified, and in fact more than one of the aforementioned modifications can be incorporated in a single compound or even at a single nucleoside within an iRNA. The present disclosure also includes iRNA compounds that are chimeric compounds.

[0472] “Chimeric” iRNA compounds or “chimeras,” in the context of this disclosure, are iRNA compounds, optionally dsRNA agents, that contain two or more chemically distinct regions, each made up of at least one monomer unit, i.e., a nucleotide in the case of a dsRNA compound. These iRNAs typically contain at least one region wherein the RNA is modified so as to confer upon the iRNA increased resistance to nuclease degradation, increased cellular uptake, or increased binding affinity for the target nucleic acid. An additional region of the iRNA can serve as a substrate for enzymes capable of cleaving RNA: DNA or RNA: RNA hybrids. By way of example, RNase H is a cellular endonuclease which cleaves the RNA strand of an RNA: DNA duplex. Activation of RNase H, therefore, results in cleavage of the RNA target, thereby greatly enhancing the efficiency of iRNA inhibition of gene expression. Consequently, comparable results can often be obtained with shorter iRNAs when chimeric dsRNAs are used, compared to phosphorothioate deoxy dsRNAs hybridizing to the same target region. Cleavage of the RNA target can be routinely detected by gel electrophoresis and, if necessary, associated nucleic acid hybridization techniques known in the art.

[0473] In certain instances, the RNA of an iRNA can be modified by a non-ligand group. A number of non-ligand molecules have been conjugated to iRNAs in order to enhance the activity, cellular distribution or cellular uptake of the iRNA, and procedures for performing such conjugations are available in the scientific literature. Such non-ligand moieties have included lipid moieties, such as cholesterol (Kubo, T. et al., Biochem. Biophys. Res. Comm., 2007, 365(1): 54-61; Letsinger et al., Proc. Natl. Acad. Sci. USA, 1989, 86: 6553), cholic acid (Manoharan et al., Bioorg. Med. Chem. Lett., 1994, 4: 1053), a thioether, e.g., hexyl-S-tritylthiol (Manoharan et al., Ann. N.Y. Acad. Sci., 1992, 660: 306; Manoharan et al., Bioorg. Med. Chem. Let., 1993, 3: 2765), a thiocholesterol (Oberhauser et al., Nucl. Acids Res., 1992, 20: 533), an aliphatic chain, e.g., dodecandiol or undecyl residues (Saison-Behmoaras et al., EMBO J., 1991, 10: 111; Kabanov et al., FEBS Lett., 1990, 259: 327; Svinarchuk et al., Biochimie, 1993, 75: 49), a phospholipid, e.g., di-hexadecyl-rac-glycerol or triethylammonium 1,2-di-O-hexadecyl-rac-glycero-3-H-phosphonate (Manoharan et al., Tetrahedron Lett., 1995, 36: 3651; Shea et al., Nucl. Acids Res., 1990, 18: 3777), a polyamine or a polyethylene glycol chain (Manoharan et al., Nucleosides & Nucleotides, 1995, 14: 969), or adamantane acetic acid (Manoharan et al., Tetrahedron Lett., 1995, 36: 3651), a palmityl moiety (Mishra et al., Biochim. Biophys. Acta, 1995, 1264: 229), or an octadecylamine or hexylamino-carbonyl-oxycholesterol moiety (Crooke et al., J. Pharmacol. Exp. Ther., 1996, 277: 923). Representative United States patents that teach the preparation of such RNA conjugates have been listed above. Typical conjugation protocols involve the synthesis of RNAs bearing an aminolinker at one or more positions of the sequence. The amino group is then reacted with the molecule being conjugated using appropriate coupling or activating reagents. The conjugation reaction can be performed either with the RNA still bound to the solid support or following cleavage of the RNA, in solution phase. Purification of the RNA conjugate by HPLC typically affords the pure conjugate.

### II. Role of APP in APP-Associated Neuropathologies

[0474] A role for APP in neuropathologies such as AD, PD and MS has recently been identified. Exemplary reports that have documented a role for APP in AD include the following:
[0475] (1) Comi et al. J Alzheimers Dis. 19: 1143-8: OPN is a molecule involved in macrophage recruitment and activation and implicated in neurodegeneration. To elucidate the role of OPN in AD, OPN levels were evaluated in serum and cerebrospinal fluid (CSF) of 67 AD patients, 46 frontotemporal dementia (FTD) patients, and 69 controls. OPN levels were identified as: significantly increased in the CSF of AD patients; ii) correlated with Mini-Mental State Exam (MMSE) score; and iii) were higher in the early disease phases (2 years). These findings support a role of OPN in AD pathogenesis.
[0476] (2) Sylvia Kang, Mayo Clinic grant in Neuroscience, “Role of APP on microglia and Alzheimer's disease”: The OPN-encoding APP gene is upregulated in microglia during aging, amyloidosis and tauopathy, with further increases in aged females over aged males. All of these contexts represent AD risk factors or AD associated pathologies, indicating that APP may play a significant role in disease. To date, little is known regarding how OPN functions in microglia and AD pathology. Using primary microglial cultures, it was demonstrated that OPN plays a pro-inflammatory role following stimulation with inflammatory mediators such as lipopolysaccharide (LPS) or aggregated tau. Additionally, APP^{-/-} mice (which do not express APP and therefore lack OPN) displayed reduced neuroinflammation following a systemic inflammatory challenge with LPS, again indicating a pro-inflammatory role for OPN. Accordingly, it appears that APP expression during amyloidosis and tauopathy significantly alters cognition, neuroinflammation, gliosis and other CNS sequelae observed in these settings.
[0477] (3) Frigerio et al. Cell Reports, 27: 1293-1306: Gene expression profiles of more than 10,000 individual microglial cells isolated from cortex and hippocampus of male and female App^{NL-G-F} mice over time demonstrated that progressive amyloid-β accumulation accelerates two main activated microglia states that are also present during normal aging. Activated response microglia (ARMs) are composed of specialized subgroups overexpressing MHC type II and putative tissue repair genes (Dkk2, Gpnmb, and APP) and are strongly enriched with Alzheimer's disease (AD) risk genes. Microglia from female mice progress faster in this activation trajectory. Similar activated states are also found in a second AD model and in human brain.
[0478] (4) Chai et al. Scientific Reports, 11, Article number: 4010 (2021): Cerebrovascular disease (CeVD) and neurodegenerative dementia such as Alzheimer's disease (AD) are frequently associated comorbidities in the elderly, sharing common risk factors and pathophysiological mechanisms including neuroinflammation. Osteopontin (OPN) is an inflammatory marker found upregulated in vascular diseases as well as in AD. However, its involvement in vascular dementia (VaD) and pre-dementia stages, namely cognitive impairment no dementia (CIND), both of which fall under the spectrum of vascular cognitive impairment (VCI), has yet to be examined. Its correlations with inflammatory cytokines in cognitive impairment also await investigation. 80 subjects with no cognitive impairment (NCI), 160 with CIND and 144 with dementia were included in a cross-sectional study on a Singapore-based memory clinic cohort. All subjects underwent comprehensive clinical, neuropsychological and brain neuroimaging assessments, together with clinical diagnoses based on established criteria. Blood samples were collected and OPN as well as inflammatory cytokines interleukin (IL)-6, IL-8 and tumor necrosis factor (TNF) were measured using immunoassays. Multivariate regression analyses showed significant associations between increased OPN and vascular cognitive impairment (VCI) groups, namely cognitive impairment no dementia (CIND) with CeVD, AD with CeVD and vascular dementia (VaD). Interestingly, higher OPN was also significantly associated with AD even in the absence of CeVD. It was further shown that increased OPN significantly associated with neuroimaging markers of CeVD and neurodegeneration, including cortical infarcts, lacunes, white matter hyperintensities and brain atrophy.

[0479] At least in view of the above, APP inhibition via administration of iRNA compositions of the instant disclosure to a subject having or at risk of developing an APP-associated neurodegenerative disease (e.g., AD, PD, MS) is projected to exert a therapeutic benefit in such a subject.

### IV. In Vivo Testing of APP Knockdown

[0480] Mouse models of APP-associated neurodegenerative disease have been generated that can be used to explore the role of APP in neurodegenerative diseases characterized by enlarged neuronal cell endosomes, such as AD and DS. Notably, an APP knock-out mouse model (APP^{-/-}) that does not produce osteopontin is known in the art and can be employed for transgenic expression of hsAPP, and such mice can also be crossed with any art-recognized mouse model of AD (e.g, CVN-AD mice, among others) and/or DS. Exemplary AD model mice include a number of transgenic mouse models obtained by transferring genes carrying mutations identified in familial AD, including APP, PS1, PS2 (Lee and Han, 2013) and tau (e.g., mmMAPT tau replaced with pathogenic variant hsMAPT tau by Michael Koob, International Conference on Alzheimer's and Parkinson's Diseases 2021 (Virtual): New Mouse Models Better Mimic Tauopathy, Alzheimer's), as well as APP/PS1 mice, which are double transgenic mice expressing a chimeric mouse/human amyloid precursor protein (Mo/HuAPP695swe) and a mutant human presenilin 1 (PS1-dE9), both directed to CNS neurons. Late-onset AD knock-in mouse models are also known in the art, including, e.g., “LOAD1” mice having human ApoE4 and the TREM2 R47H variant knocked in and “LOAD2” mice expressing knocked-in human ApoE4, TREM2 R47H, and humanized Aβ42 (“LOAD1” mice having human ApoE4 and the TREM2 R47H variant knocked in and “LOAD2” mice expressing knocked-in human ApoE4, TREM2 R47H, and humanized Aβ42 (Adrian Oblak, International Conference on Alzheimer's and Parkinson's Diseases 2021 (Virtual): New Mouse Models Better Mimic Tauopathy, Alzheimer's).

[0481] APPSwe/PSEN1(A246E) mice (Borchelt et al. Neuron. 19: 939-45) are also contemplated for use as a model of combined PSEN1 and APP mutation, as such mice likely also exhibit enlarged endosomes.

[0482] Murine models for DS in wide use include, without limitation, those profiled in Herault et al. Dis Model Mech. 10: 1165-1186, particularly including the TS65Dn mouse model (segmental trisomy of mouse chr. 16; Cataldo et al. J Neurosci Off J Soc Neurosc 23:6788-6792), which replicates neurological symptoms seen in Down syndrome patients (Galdzicki and Siarey Genes Brain Behav 2:167-178). Patients with DS tend to develop AD pathology by the age of 45. The early onset of Alzheimer's disease is thought to be a result of three copies of APP in DS patients.

### V. Delivery of an RNAi Agent of the Disclosure

[0483] The delivery of an RNAi agent of the disclosure to a cell e.g., a cell within a subject, such as a human subject (e.g., a subject in need thereof, such as a subject having an APP-associated disorder characterized by enlarged neuronal cell endosomes, e.g., Alzheimer's disease (AD) or Down syndrome (DS), can be achieved in a number of different ways. For example, delivery may be performed by contacting a cell with an RNAi agent of the disclosure either in vitro or in vivo. In vivo delivery may also be performed directly by administering a composition comprising an RNAi agent, e.g., a dsRNA, to a subject. Alternatively, in vivo delivery may be performed indirectly by administering one or more vectors that encode and direct the expression of the RNAi agent. These alternatives are discussed further below.

[0484] In general, any method of delivering a nucleic acid molecule (in vitro or in vivo) can be adapted for use with an RNAi agent of the disclosure (see e.g., Akhtar S. and Julian R L., (1992) Trends Cell. Biol. 2(5): 139-144 and WO94/02595, which are incorporated herein by reference in their entireties). For in vivo delivery, factors to consider for delivering an RNAi agent include, for example, biological stability of the delivered agent, prevention of non-specific effects, and accumulation of the delivered agent in the target tissue. The non-specific effects of an RNAi agent can be minimized by local administration, for example, by direct injection or implantation into a tissue or topically administering the preparation. Local administration to a treatment site maximizes local concentration of the agent, limits the exposure of the agent to systemic tissues that can otherwise be harmed by the agent or that can degrade the agent, and permits a lower total dose of the RNAi agent to be administered. Several studies have shown successful knockdown of gene products when an RNAi agent is administered locally. For example, intraocular delivery of a VEGF dsRNA by intravitreal injection in cynomolgus monkeys (Tolentino, M J. et al., (2004) Retina 24: 132-138) and subretinal injections in mice (Reich, S J. et al. (2003) Mol. Vis. 9: 210-216) were both shown to prevent neovascularization in an experimental model of age-related macular degeneration. In addition, direct intratumoral injection of a dsRNA in mice reduces tumor volume (Pille, J. et al. (2005)Mol. Ther. 11: 267-274) and can prolong survival of tumor-bearing mice (Kim, W J. et al., (2006) Mol. Ther. 14: 343-350; Li, S. et al., (2007) Mol. Ther. 15: 515-523). RNA interference has also shown success with local delivery to the CNS by direct injection (Dorn, G. et al., (2004) Nucleic Acids 32: e49; Tan, P H. et al. (2005) Gene Ther. 12: 59-66; Makimura, H. et al. (2002) BMC Neurosci. 3: 18; Shishkina, G T., et al. (2004) Neuroscience 129: 521-528; Thakker, E R., et al. (2004) Proc. Natl. Acad. Sci. U.S.A. 101: 17270-17275; Akaneya, Y., et al. (2005) J. Neurophysiol. 93: 594-602) and to the lungs by intranasal administration (Howard, K A. et al., (2006) Mol. Ther. 14: 476-484; Zhang, X. et al., (2004) J. Biol. Chem. 279: 10677-10684; Bitko, V. et al., (2005) Nat. Med. 11: 50-55). For administering an RNAi agent systemically for the treatment of a disease, the RNA can be modified or alternatively delivered using a drug delivery system; both methods act to prevent the rapid degradation of the dsRNA by endo- and exo-nucleases in vivo. Modification of the RNA or the pharmaceutical carrier can also permit targeting of the RNAi agent to the target tissue and avoid undesirable off-target effects (e.g., without wishing to be bound by theory, use of GNAs as described herein has been identified to destabilize the seed region of a dsRNA, resulting in enhanced preference of such dsRNAs for on-target effectiveness, relative to off-target effects, as such off-target effects are significantly weakened by such seed region destabilization). RNAi agents can be modified by chemical conjugation to lipophilic groups such as cholesterol to enhance cellular uptake and prevent degradation. For example, an RNAi agent directed against ApoB conjugated to a lipophilic cholesterol moiety was injected systemically into mice and resulted in knockdown of apoB mRNA in both the liver and jejunum (Soutschek, J. et al., (2004) Nature 432: 173-178). Conjugation of an RNAi agent to an aptamer has been shown to inhibit tumor growth and mediate tumor regression in a mouse model of prostate cancer (McNamara, J O. et al., (2006) Nat. Biotechnol. 24: 1005-1015). In an alternative embodiment, the RNAi agent can be delivered using drug delivery systems such as a nanoparticle, a dendrimer, a polymer, liposomes, or a cationic delivery system. Positively charged cationic delivery systems facilitate binding of molecule RNAi agent (negatively charged) and also enhance interactions at the negatively charged cell membrane to permit efficient uptake of an RNAi agent by the cell. Cationic lipids, dendrimers, or polymers can either be bound to an RNAi agent, or induced to form a vesicle or micelle (see e.g., Kim S H. et al., (2008) Journal of Controlled Release 129(2): 107-116) that encases an RNAi agent. The formation of vesicles or micelles further prevents degradation of the RNAi agent when administered systemically. Methods for making and administering cationic-RNAi agent complexes are well within the abilities of one skilled in the art (see e.g., Sorensen, D R., et al. (2003) J. Mol. Biol 327: 761-766; Verma, U N. et al., (2003) Clin. Cancer Res. 9: 1291-1300; Arnold, A S et al. (2007) J. Hypertens. 25: 197-205, which are incorporated herein by reference in their entirety). Some non-limiting examples of drug delivery systems useful for systemic delivery of RNAi agents include DOTAP (Sorensen, D R., et al (2003), supra; Verma, U N. et al., (2003), supra), Oligofectamine, “solid nucleic acid lipid particles” (Zimmermann, T S. et al., (2006) Nature 441: 111-114), cardiolipin (Chien, P Y. et al., (2005) Cancer Gene Ther. 12: 321-328; Pal, A. et al., (2005) Int J. Oncol. 26: 1087-1091), polyethyleneimine (Bonnet M E. et al., (2008) Pharm. Res. August 16 Epub ahead of print; Aigner, A. (2006) J. Biomed. Biotechnol. 71659), Arg-Gly-Asp (RGD) peptides (Liu, S. (2006) Mol. Pharm. 3: 472-487), and polyamidoamines (Tomalia, D A. et al., (2007) Biochem. Soc. Trans. 35: 61-67; Yoo, H. et al., (1999) Pharm. Res. 16: 1799-1804). In some embodiments, an RNAi agent forms a complex with cyclodextrin for systemic administration. Methods for administration and pharmaceutical compositions of RNAi agents and cyclodextrins can be found in U.S. Pat. No. 7,427,605, which is herein incorporated by reference in its entirety.

[0485] Certain aspects of the instant disclosure relate to a method of reducing the expression of an APP target gene in a cell, comprising contacting said cell with the double-stranded RNAi agent of the disclosure. In one embodiment, the cell is a hepatic cell, optionally a hepatocyte. In one embodiment, the cell is an extrahepatic cell, optionally a CNS cell.

[0486] Another aspect of the disclosure relates to a method of reducing the expression of an APP target gene in a subject, comprising administering to the subject the double-stranded RNAi agent of the disclosure.

[0487] Another aspect of the disclosure relates to a method of treating a subject having an APP-associated disorder characterized by enlarged neuronal cell endosomes, comprising administering to the subject a therapeutically effective amount of the double-stranded RNAi agent of the disclosure, thereby treating the subject. Exemplary CNS disorders that can be treated by the method of the disclosure include Alzheimer's disease (AD) and Down syndrome (DS).

[0488] In one embodiment, the double-stranded RNAi agent is administered subcutaneously.

[0489] In one embodiment, the double-stranded RNAi agent is administered intrathecally. By intrathecal administration of the double-stranded RNAi agent, the method can reduce the expression of an APP target gene in a brain (e.g., frontal lobe) tissue, for instance, entorhinal cortex of medial temporal lobe, hippocampus, cerebral cortex, basal ganglia, substantia nigra, etc.

[0490] For ease of exposition the formulations, compositions and methods in this section are discussed largely with regard to modified siRNA compounds. It may be understood, however, that these formulations, compositions and methods can be practiced with other siRNA compounds, e.g., unmodified siRNA compounds, and such practice is within the disclosure. A composition that includes an RNAi agent can be delivered to a subject by a variety of routes. Exemplary routes include: intrathecal, intravenous, topical, rectal, anal, vaginal, nasal, pulmonary, and ocular.

[0491] The RNAi agents of the disclosure can be incorporated into pharmaceutical compositions suitable for administration. Such compositions typically include one or more species of RNAi agent and a pharmaceutically acceptable carrier. As used herein the language “pharmaceutically acceptable carrier” is intended to include any and all solvents, dispersion media, coatings, antibacterial and antifungal agents, isotonic and absorption delaying agents, and the like, compatible with pharmaceutical administration. The use of such media and agents for pharmaceutically active substances is well known in the art. Except insofar as any conventional media or agent is incompatible with the active compound, use thereof in the compositions is contemplated. Supplementary active compounds can also be incorporated into the compositions.

[0492] The pharmaceutical compositions of the present disclosure may be administered in a number of ways depending upon whether local or systemic treatment is desired and upon the area to be treated. Administration may be topical (including ophthalmic, vaginal, rectal, intranasal, transdermal), oral, or parenteral. Parenteral administration includes intravenous drip, subcutaneous, intraperitoneal or intramuscular injection, or intrathecal or intraventricular administration.

[0493] The route and site of administration may be chosen to enhance targeting. For example, to target muscle cells, intramuscular injection into the muscles of interest would be a logical choice. Lung cells might be targeted by administering the RNAi agent in aerosol form. The vascular endothelial cells could be targeted by coating a balloon catheter with the RNAi agent and mechanically introducing the RNA.

[0494] Formulations for topical administration may include transdermal patches, ointments, lotions, creams, gels, drops, suppositories, sprays, liquids, and powders. Conventional pharmaceutical carriers, aqueous, powder or oily bases, thickeners and the like may be necessary or desirable. Coated condoms, gloves and the like may also be useful.

[0495] Compositions for oral administration include powders or granules, suspensions or solutions in water, syrups, elixirs or non-aqueous media, tablets, capsules, lozenges, or troches. In the case of tablets, carriers that can be used include lactose, sodium citrate and salts of phosphoric acid. Various disintegrants such as starch, and lubricating agents such as magnesium stearate, sodium lauryl sulfate and talc, are commonly used in tablets. For oral administration in capsule form, useful diluents are lactose and high molecular weight polyethylene glycols. When aqueous suspensions are required for oral use, the nucleic acid compositions can be combined with emulsifying and suspending agents. If desired, certain sweetening or flavoring agents can be added.

[0496] Compositions for intrathecal or intraventricular administration may include sterile aqueous solutions which may also contain buffers, diluents, and other suitable additives.

[0497] Formulations for parenteral administration may include sterile aqueous solutions which may also contain buffers, diluents, and other suitable additives. Intraventricular injection may be facilitated by an intraventricular catheter, for example, attached to a reservoir. For intravenous use, the total concentration of solutes may be controlled to render the preparation isotonic.

[0498] In one embodiment, the administration of the siRNA compound, e.g., a double-stranded siRNA compound, or ssiRNA compound, composition is parenteral, e.g., intravenous (e.g., as a bolus or as a diffusible infusion), intradermal, intraperitoneal, intramuscular, intrathecal, intraventricular, intracranial, subcutaneous, transmucosal, buccal, sublingual, endoscopic, rectal, oral, vaginal, topical, pulmonary, intranasal, urethral, or ocular. Administration can be provided by the subject or by another person, e.g., a health care provider. The medication can be provided in measured doses or in a dispenser which delivers a metered dose. Selected modes of delivery are discussed in more detail below.

### Intrathecal Administration

[0499] In one embodiment, the double-stranded RNAi agent is delivered by intrathecal injection (i.e., injection into the spinal fluid which bathes the brain and spinal cord tissue). Intrathecal injection of RNAi agents into the spinal fluid can be performed as a bolus injection or via minipumps which can be implanted beneath the skin, providing a regular and constant delivery of siRNA into the spinal fluid. The circulation of the spinal fluid from the choroid plexus, where it is produced, down around the spinal cord and dorsal root ganglia and subsequently up past the cerebellum and over the cortex to the arachnoid granulations, where the fluid can exit the CNS, that, depending upon size, stability, and solubility of the compounds injected, molecules delivered intrathecally could hit targets throughout the entire CNS.

[0500] In some embodiments, the intrathecal administration is via a pump. The pump may be a surgically implanted osmotic pump. In one embodiment, the osmotic pump is implanted into the subarachnoid space of the spinal canal to facilitate intrathecal administration.

[0501] In some embodiments, the intrathecal administration is via an intrathecal delivery system for a pharmaceutical including a reservoir containing a volume of the pharmaceutical agent, and a pump configured to deliver a portion of the pharmaceutical agent contained in the reservoir. More details about this intrathecal delivery system may be found in WO 2015/116658, which is incorporated by reference in its entirety.

[0502] The amount of intrathecally injected RNAi agents may vary from one target gene to another target gene and the appropriate amount that has to be applied may have to be determined individually for each target gene. Typically, this amount ranges from 10 μg to 2 mg, optionally 50 g to 1500 μg, more optionally 100 μg to 1000 μg.

### Vector-Encoded RNAi Agents of the Disclosure

[0503] RNAi agents targeting the APP gene can be expressed from transcription units inserted into DNA or RNA vectors (see, e.g., Couture, A, et al., TIG. (1996), 12: 5-10; WO 00/22113, WO 00/22114, and U.S. Pat. No. 6,054,299). Expression is optionally sustained (months or longer), depending upon the specific construct used and the target tissue or cell type. These transgenes can be introduced as a linear construct, a circular plasmid, or a viral vector, which can be an integrating or non-integrating vector. The transgene can also be constructed to permit it to be inherited as an extrachromosomal plasmid (Gassmann, et al., (1995) Proc. Natl. Acad. Sci. USA 92: 1292).

[0504] The individual strand or strands of an RNAi agent can be transcribed from a promoter on an expression vector. Where two separate strands are to be expressed to generate, for example, a dsRNA, two separate expression vectors can be co-introduced (e.g., by transfection or infection) into a target cell. Alternatively, each individual strand of a dsRNA can be transcribed by promoters both of which are located on the same expression plasmid. In one embodiment, a dsRNA is expressed as inverted repeat polynucleotides joined by a linker polynucleotide sequence such that the dsRNA has a stem and loop structure.

[0505] RNAi agent expression vectors are generally DNA plasmids or viral vectors. Expression vectors compatible with eukaryotic cells, optionally those compatible with vertebrate cells, can be used to produce recombinant constructs for the expression of an RNAi agent as described herein. Delivery of RNAi agent expressing vectors can be systemic, such as by intravenous or intramuscular administration, by administration to target cells ex-planted from the patient followed by reintroduction into the patient, or by any other means that allows for introduction into a desired target cell.

[0506] Viral vector systems which can be utilized with the methods and compositions described herein include, but are not limited to, (a) adenovirus vectors; (b) retrovirus vectors, including but not limited to lentiviral vectors, moloney murine leukemia virus, etc.; (c) adeno-associated virus (AAV) vectors; (d) herpes simplex virus vectors; (e) SV 40 vectors; (f) polyoma virus vectors; (g) papilloma virus vectors; (h) picornavirus vectors; (i) pox virus vectors such as an orthopox, e.g., vaccinia virus vectors or avipox, e.g. canary pox or fowl pox; and (j) a helper-dependent or gutless adenovirus. Replication-defective viruses can also be advantageous. Different vectors will or will not become incorporated into the cells' genome. The constructs can include viral sequences for transfection, if desired. Alternatively, the construct can be incorporated into vectors capable of episomal replication, e.g. EPV and EBV vectors. Constructs for the recombinant expression of an RNAi agent will generally require regulatory elements, e.g., promoters, enhancers, etc., to ensure the expression of the RNAi agent in target cells. Other aspects to consider for vectors and constructs are known in the art.

### VI. Pharmaceutical Compositions of the Invention

[0507] The present disclosure also includes pharmaceutical compositions and formulations which include the RNAi agents of the disclosure. In one embodiment, provided herein are pharmaceutical compositions containing an RNAi agent, as described herein, and a pharmaceutically acceptable carrier. The pharmaceutical compositions containing the RNAi agent are useful for treating a disease or disorder associated with the expression or activity of APP that is further characterized by enlarged neuronal cell endosomes, e.g., Alzheimer's disease (AD) or Down syndrome (DS).

[0508] Such pharmaceutical compositions are formulated based on the mode of delivery. One example is compositions that are formulated for systemic administration via parenteral delivery, e.g., by intravenous (IV), intramuscular (IM), or for subcutaneous (subQ) delivery. Another example is compositions that are formulated for direct delivery into the CNS, e.g., by intrathecal or intravitreal routes of injection, optionally by infusion into the brain (e.g., entorhinal cortex of medial temporal lobe, hippocampus, cerebral cortex, basal ganglia, substantia nigra, etc.), such as by continuous pump infusion.

[0509] In some embodiments, the pharmaceutical compositions of the disclosure are pyrogen free or non-pyrogenic.

[0510] The pharmaceutical compositions of the disclosure may be administered in dosages sufficient to inhibit expression of an APP gene. In general, a suitable dose of an RNAi agent of the disclosure will be in the range of about 0.001 to about 200.0 milligrams per kilogram body weight of the recipient per day, generally in the range of about 1 to 50 mg per kilogram body weight per day.

[0511] A repeat-dose regimen may include administration of a therapeutic amount of an RNAi agent on a regular basis, such as monthly to once every six months. In certain embodiments, the RNAi agent is administered about once per quarter (i.e., about once every three months) to about twice per year.

[0512] After an initial treatment regimen (e.g., loading dose), the treatments can be administered on a less frequent basis.

[0513] In other embodiments, a single dose of the pharmaceutical compositions can be long lasting, such that subsequent doses are administered at not more than 1, 2, 3, or 4 or more month intervals. In some embodiments of the disclosure, a single dose of the pharmaceutical compositions of the disclosure is administered once per month. In other embodiments of the disclosure, a single dose of the pharmaceutical compositions of the disclosure is administered once per quarter to twice per year.

[0514] The skilled artisan will appreciate that certain factors can influence the dosage and timing required to effectively treat a subject, including but not limited to the severity of the disease or disorder, previous treatments, the general health or age of the subject, and other diseases present. Moreover, treatment of a subject with a therapeutically effective amount of a composition can include a single treatment or a series of treatments.

[0515] Advances in mouse genetics have generated mouse models for the study of APP-associated diseases characterized by enlarged neuronal cell endosomes that would benefit from reduction in the expression of APP. Such models can be used for in vivo testing of RNAi agents, as well as for determining a therapeutically effective dose. Suitable mouse models are known in the art and include, for example, the mouse models described elsewhere herein.

[0516] The pharmaceutical compositions of the present disclosure can be administered in a number of ways depending upon whether local or systemic treatment is desired and upon the area to be treated. Administration can be topical (e.g., by a transdermal patch), pulmonary, e.g., by inhalation or insufflation of powders or aerosols, including by nebulizer; intratracheal, intranasal, epidermal and transdermal, oral or parenteral. Parenteral administration includes intravenous, intraarterial, subcutaneous, intraperitoneal or intramuscular injection or infusion; subdermal, e.g., via an implanted device; or intracranial, e.g., by intraparenchymal, intrathecal or intraventricular, administration.

[0517] The RNAi agents can be delivered in a manner to target a particular tissue, such as the liver, the CNS (e.g., neuronal, glial or vascular tissue of the brain), or both the liver and CNS.

[0518] Pharmaceutical compositions and formulations for topical administration can include transdermal patches, ointments, lotions, creams, gels, drops, suppositories, sprays, liquids and powders. Conventional pharmaceutical carriers, aqueous, powder or oily bases, thickeners and the like can be necessary or desirable. Coated condoms, gloves and the like can also be useful. Suitable topical formulations include those in which the RNAi agents featured in the disclosure are in admixture with a topical delivery agent such as lipids, liposomes, fatty acids, fatty acid esters, steroids, chelating agents and surfactants. Suitable lipids and liposomes include neutral (e.g., dioleoylphosphatidyl DOPE ethanolamine, dimyristoylphosphatidyl choline DMPC, distearolyphosphatidyl choline) negative (e.g., dimyristoylphosphatidyl glycerol DMPG) and cationic (e.g., dioleoyltetramethylaminopropyl DOTAP and dioleoylphosphatidyl ethanolamine DOTMA). RNAi agents featured in the disclosure can be encapsulated within liposomes or can form complexes thereto, in particular to cationic liposomes. Alternatively, RNAi agents can be complexed to lipids, in particular to cationic lipids. Suitable fatty acids and esters include but are not limited to arachidonic acid, oleic acid, eicosanoic acid, lauric acid, caprylic acid, capric acid, myristic acid, palmitic acid, stearic acid, linoleic acid, linolenic acid, dicaprate, tricaprate, monoolein, dilaurin, glyceryl 1-monocaprate, 1-dodecylazacycloheptan-2-one, an acylcarnitine, an acylcholine, or a C₁₋₂₀ alkyl ester (e.g., isopropylmyristate IPM), monoglyceride, diglyceride or pharmaceutically acceptable salt thereof. Topical formulations are described in detail in U.S. Pat. No. 6,747,014, which is incorporated herein by reference.

### A. RNAi Agent Formulations Comprising Membranous Molecular Assemblies

[0519] An RNAi agent for use in the compositions and methods of the disclosure can be formulated for delivery in a membranous molecular assembly, e.g., a liposome or a micelle. As used herein, the term “liposome” refers to a vesicle composed of amphiphilic lipids arranged in at least one bilayer, e.g., one bilayer or a plurality of bilayers. Liposomes include unilamellar and multilamellar vesicles that have a membrane formed from a lipophilic material and an aqueous interior. The aqueous portion contains the RNAi agent composition. The lipophilic material isolates the aqueous interior from an aqueous exterior, which typically does not include the RNAi agent composition, although in some examples, it may. Liposomes are useful for the transfer and delivery of active ingredients to the site of action. Because the liposomal membrane is structurally similar to biological membranes, when liposomes are applied to a tissue, the liposomal bilayer fuses with bilayer of the cellular membranes. As the merging of the liposome and cell progresses, the internal aqueous contents that include the RNAi agent are delivered into the cell where the RNAi agent can specifically bind to a target RNA and can mediate RNAi. In some cases, the liposomes are also specifically targeted, e.g., to direct the RNAi agent to particular cell types.

[0520] A liposome containing an RNAi agent can be prepared by a variety of methods. In one example, the lipid component of a liposome is dissolved in a detergent so that micelles are formed with the lipid component. For example, the lipid component can be an amphipathic cationic lipid or lipid conjugate. The detergent can have a high critical micelle concentration and may be nonionic. Exemplary detergents include cholate, CHAPS, octylglucoside, deoxycholate, and lauroyl sarcosine. The RNAi agent preparation is then added to the micelles that include the lipid component. The cationic groups on the lipid interact with the RNAi agent and condense around the RNAi agent to form a liposome. After condensation, the detergent is removed, e.g., by dialysis, to yield a liposomal preparation of RNAi agent.

[0521] If necessary, a carrier compound that assists in condensation can be added during the condensation reaction, e.g., by controlled addition. For example, the carrier compound can be a polymer other than a nucleic acid (e.g., spermine or spermidine). pH can also be adjusted to favor condensation.

[0522] Methods for producing stable polynucleotide delivery vehicles, which incorporate a polynucleotide/cationic lipid complex as structural components of the delivery vehicle, are further described in, e.g., WO 96/37194, the entire contents of which are incorporated herein by reference. Liposome formation can also include one or more aspects of exemplary methods described in Felgner, P. L. et al., (1987) Proc. Natl. Acad. Sci. USA 8: 7413-7417; U.S. Pat. Nos. 4,897,355; 5,171,678; Bangham et al., (1965) M. Mol. Biol. 23: 238; Olson et al., (1979) Biochim. Biophys. Acta 557: 9; Szoka et al., (1978) Proc. Natl. Acad. Sci. 75: 4194; Mayhew et al., (1984) Biochim. Biophys. Acta 775: 169; Kim et al., (1983) Biochim. Biophys. Acta 728: 339; and Fukunaga et al., (1984) Endocrinol. 115: 757. Commonly used techniques for preparing lipid aggregates of appropriate size for use as delivery vehicles include sonication and freeze-thaw plus extrusion (see, e.g., Mayer et al., (1986) Biochim. Biophys. Acta 858: 161. Microfluidization can be used when consistently small (50 to 200 nm) and relatively uniform aggregates are desired (Mayhew et al., (1984) Biochim. Biophys. Acta 775: 169. These methods are readily adapted to packaging RNAi agent preparations into liposomes.

[0523] Liposomes fall into two broad classes. Cationic liposomes are positively charged liposomes which interact with the negatively charged nucleic acid molecules to form a stable complex. The positively charged nucleic acid/liposome complex binds to the negatively charged cell surface and is internalized in an endosome. Due to the acidic pH within the endosome, the liposomes are ruptured, releasing their contents into the cell cytoplasm (Wang et al. (1987) Biochem. Biophys. Res. Commun., 147: 980-985).

[0524] Liposomes, which are pH-sensitive or negatively charged, entrap nucleic acids rather than complex with them. Since both the nucleic acid and the lipid are similarly charged, repulsion rather than complex formation occurs. Nevertheless, some nucleic acid is entrapped within the aqueous interior of these liposomes. pH sensitive liposomes have been used to deliver nucleic acids encoding the thymidine kinase gene to cell monolayers in culture. Expression of the exogenous gene was detected in the target cells (Zhou et al. (1992) Journal of Controlled Release, 19: 269-274).

[0525] One major type of liposomal composition includes phospholipids other than naturally-derived phosphatidylcholine. Neutral liposome compositions, for example, can be formed from dimyristoyl phosphatidylcholine (DMPC) or dipalmitoyl phosphatidylcholine (DPPC). Anionic liposome compositions generally are formed from dimyristoyl phosphatidylglycerol, while anionic fusogenic liposomes are formed primarily from dioleoyl phosphatidylethanolamine (DOPE). Another type of liposomal composition is formed from phosphatidylcholine (PC) such as, for example, soybean PC, and egg PC. Another type is formed from mixtures of phospholipid or phosphatidylcholine or cholesterol.

[0526] Examples of other methods to introduce liposomes into cells in vitro and in vivo include U.S. Pat. Nos. 5,283,185; 5,171,678; WO 94/00569; WO 93/24640; WO 91/16024; Felgner, (1994) J. Biol. Chem. 269: 2550; Nabel, (1993) Proc. Natl. Acad. Sci. 90: 11307; Nabel, (1992) Human Gene Ther. 3: 649; Gershon, (1993) Biochem. 32: 7143; and Strauss, (1992) EMBO J. 11: 417.

[0527] Non-ionic liposomal systems have also been examined to determine their utility in the delivery of drugs to the skin, in particular systems comprising non-ionic surfactant and cholesterol. Non-ionic liposomal formulations comprising Novasome™ I (glyceryl dilaurate/cholesterol/polyoxyethylene-10-stearyl ether) and Novasome™ II (glyceryl distearate/cholesterol/polyoxyethylene-10-stearyl ether) were used to deliver cyclosporin-A into the dermis of mouse skin. Results indicated that such non-ionic liposomal systems were effective in facilitating the deposition of cyclosporine A into different layers of the skin (Hu et al., (1994) S.T.P.Pharma. Sci., 4(6): 466).

[0528] Liposomes also include “sterically stabilized” liposomes, a term which, as used herein, refers to liposomes comprising one or more specialized lipids that, when incorporated into liposomes, result in enhanced circulation lifetimes relative to liposomes lacking such specialized lipids. Examples of sterically stabilized liposomes are those in which part of the vesicle-forming lipid portion of the liposome (A) comprises one or more glycolipids, such as monosialoganglioside GM1, or (B) is derivatized with one or more hydrophilic polymers, such as a polyethylene glycol (PEG) moiety. While not wishing to be bound by any particular theory, it is thought in the art that, at least for sterically stabilized liposomes containing gangliosides, sphingomyelin, or PEG-derivatized lipids, the enhanced circulation half-life of these sterically stabilized liposomes derives from a reduced uptake into cells of the reticuloendothelial system (RES) (Allen et al., (1987) FEBS Letters, 223: 42; Wu et al., (1993) Cancer Research, 53: 3765).

[0529] Various liposomes comprising one or more glycolipids are known in the art. Papahadjopoulos et al. (Ann. N.Y. Acad. Sci., (1987), 507: 64) reported the ability of monosialoganglioside GM1, galactocerebroside sulfate and phosphatidylinositol to improve blood half-lives of liposomes. These findings were expounded upon by Gabizon et al. (Proc. Natl. Acad. Sci. U.S.A., (1988), 85: 6949). U.S. Pat. No. 4,837,028 and WO 88/04924, both to Allen et al., disclose liposomes comprising (1) sphingomyelin and (2) the ganglioside GM1 or a galactocerebroside sulfate ester. U.S. Pat. No. 5,543,152 (Webb et al.) discloses liposomes comprising sphingomyelin. Liposomes comprising 1,2-sn-dimyristoylphosphatidylcholine are disclosed in WO 97/13499 (Lim et al).

[0530] In one embodiment, cationic liposomes are used. Cationic liposomes possess the advantage of being able to fuse to the cell membrane. Non-cationic liposomes, although not able to fuse as efficiently with the plasma membrane, are taken up by macrophages in vivo and can be used to deliver RNAi agents to macrophages.

[0531] Further advantages of liposomes include: liposomes obtained from natural phospholipids are biocompatible and biodegradable; liposomes can incorporate a wide range of water and lipid soluble drugs; liposomes can protect encapsulated RNAi agents in their internal compartments from metabolism and degradation (Rosoff, in “Pharmaceutical Dosage Forms,” Lieberman, Rieger and Banker (Eds.), 1988, volume 1, p. 245). Important considerations in the preparation of liposome formulations are the lipid surface charge, vesicle size and the aqueous volume of the liposomes.

[0532] A positively charged synthetic cationic lipid, N-[1-(2,3-dioleyloxy)propyl]-N,N,N-trimethylammonium chloride (DOTMA) can be used to form small liposomes that interact spontaneously with nucleic acid to form lipid-nucleic acid complexes which are capable of fusing with the negatively charged lipids of the cell membranes of tissue culture cells, resulting in delivery of RNAi agent (see, e.g., Felgner, P. L. et al., (1987) Proc. Natl. Acad. Sci. USA 8: 7413-7417, and U.S. Pat. No. 4,897,355 for a description of DOTMA and its use with DNA).

[0533] A DOTMA analogue, 1,2-bis(oleoyloxy)-3-(trimethylammonia)propane (DOTAP) can be used in combination with a phospholipid to form DNA-complexing vesicles. Lipofectin™ Bethesda Research Laboratories, Gaithersburg, Md.) is an effective agent for the delivery of highly anionic nucleic acids into living tissue culture cells that comprise positively charged DOTMA liposomes which interact spontaneously with negatively charged polynucleotides to form complexes. When enough positively charged liposomes are used, the net charge on the resulting complexes is also positive. Positively charged complexes prepared in this way spontaneously attach to negatively charged cell surfaces, fuse with the plasma membrane, and efficiently deliver functional nucleic acids into, for example, tissue culture cells. Another commercially available cationic lipid, 1,2-bis(oleoyloxy)-3,3-(trimethylammonia)propane (“DOTAP”) (Boehringer Mannheim, Indianapolis, Indiana) differs from DOTMA in that the oleoyl moieties are linked by ester, rather than ether linkages.

[0534] Other reported cationic lipid compounds include those that have been conjugated to a variety of moieties including, for example, carboxyspermine which has been conjugated to one of two types of lipids and includes compounds such as 5-carboxyspermylglycine dioctaoleoylamide (“DOGS”) (Transfectam™, Promega, Madison, Wisconsin) and dipalmitoylphosphatidylethanolamine 5-carboxyspermyl-amide (“DPPES”) (see, e.g., U.S. Pat. No. 5,171,678).

[0535] Another cationic lipid conjugate includes derivatization of the lipid with cholesterol (“DC-Chol”) which has been formulated into liposomes in combination with DOPE (See, Gao, X. and Huang, L., (1991) Biochim. Biophys. Res. Commun. 179: 280). Lipopolylysine, made by conjugating polylysine to DOPE, has been reported to be effective for transfection in the presence of serum (Zhou, X. et al., (1991) Biochim. Biophys. Acta 1065: 8). For certain cell lines, these liposomes containing conjugated cationic lipids, are said to exhibit lower toxicity and provide more efficient transfection than the DOTMA-containing compositions. Other commercially available cationic lipid products include DMRIE and DMRIE-HP (Vical, La Jolla, California) and Lipofectamine (DOSPA) (Life Technology, Inc., Gaithersburg, Maryland). Other cationic lipids suitable for the delivery of oligonucleotides are described in WO 98/39359 and WO 96/37194.

[0536] Liposomal formulations are particularly suited for topical administration, liposomes present several advantages over other formulations. Such advantages include reduced side effects related to high systemic absorption of the administered drug, increased accumulation of the administered drug at the desired target, and the ability to administer RNAi agent into the skin. In some implementations, liposomes are used for delivering RNAi agent to epidermal cells and also to enhance the penetration of RNAi agent into dermal tissues, e.g., into skin. For example, the liposomes can be applied topically. Topical delivery of drugs formulated as liposomes to the skin has been documented (see, e.g., Weiner et al., (1992) Journal of Drug Targeting, vol. 2,405-410 and du Plessis et al., (1992) Antiviral Research, 18: 259-265; Mannino, R. J. and Fould-Fogerite, S., (1998) Biotechniques 6: 682-690; Itani, T. et al., (1987) Gene 56: 267-276; Nicolau, C. et al. (1987) Meth. Enzymol. 149: 157-176; Straubinger, R. M. and Papahadjopoulos, D. (1983) Meth. Enzymol. 101: 512-527; Wang, C. Y. and Huang, L., (1987) Proc. Natl. Acad. Sci. USA 84: 7851-7855).

[0537] Non-ionic liposomal systems have also been examined to determine their utility in the delivery of drugs to the skin, in particular systems comprising non-ionic surfactant and cholesterol. Non-ionic liposomal formulations comprising Novasome I (glyceryl dilaurate/cholesterol/polyoxyethylene-10-stearyl ether) and Novasome II (glyceryl distearate/cholesterol/polyoxyethylene-10-stearyl ether) were used to deliver a drug into the dermis of mouse skin. Such formulations with RNAi agent are useful for treating a dermatological disorder.

[0538] Liposomes that include RNAi agents can be made highly deformable. Such deformability can enable the liposomes to penetrate through pore that are smaller than the average radius of the liposome. For example, transfersomes (highly deformable lipid aggregates which are attractive candidates for drug delivery vehicles) are a type of deformable liposomes. Transfersomes can be described as lipid droplets which are so highly deformable that they are easily able to penetrate through pores which are smaller than the droplet. Transfersomes are adaptable to the environment in which they are used, e.g., they are self-optimizing (adaptive to the shape of pores in the skin), self-repairing, frequently reach their targets without fragmenting, and often self-loading. Transferosomes can be made by adding surface edge activators, usually surfactants, to a standard liposomal composition. Transfersomes have been used to deliver serum albumin to the skin. The transfersome-mediated delivery of serum albumin has been shown to be as effective as subcutaneous injection of a solution containing serum albumin. Transfersomes that include RNAi agent can be delivered, for example, subcutaneously by infection in order to deliver RNAi agent to keratinocytes in the skin. In order to cross intact mammalian skin, lipid vesicles must pass through a series of fine pores, each with a diameter less than 50 nm, under the influence of a suitable transdermal gradient. In addition, due to the lipid properties, these transfersomes can be self-optimizing (adaptive to the shape of pores, e.g., in the skin), self-repairing, and can frequently reach their targets without fragmenting, and often self-loading.

[0539] Other formulations amenable to the present disclosure are described in U.S. provisional application Ser. No. 61/018,616, filed Jan. 2, 2008; 61/018,611, filed Jan. 2, 2008; 61/039,748, filed Mar. 26, 2008; 61/047,087, filed Apr. 22, 2008 and 61/051,528, filed May 8, 2008. PCT application number PCT/US2007/080331, filed Oct. 3, 2007, also describes formulations that are amenable to the present disclosure.

[0540] Surfactants find wide application in formulations such as those described herein, particularly in emulsions (including microemulsions) and liposomes. The most common way of classifying and ranking the properties of the many different types of surfactants, both natural and synthetic, is by the use of the hydrophile/lipophile balance (HLB). The nature of the hydrophilic group (also known as the “head”) provides the most useful means for categorizing the different surfactants used in formulations (Rieger, in Pharmaceutical Dosage Forms, Marcel Dekker, Inc., New York, N.Y., 1988, p. 285).

[0541] If the surfactant molecule is not ionized, it is classified as a nonionic surfactant. Nonionic surfactants find wide application in pharmaceutical and cosmetic products and are usable over a wide range of pH values. In general, their HLB values range from 2 to about 18 depending on their structure. Nonionic surfactants include nonionic esters such as ethylene glycol esters, propylene glycol esters, glyceryl esters, polyglyceryl esters, sorbitan esters, sucrose esters, and ethoxylated esters. Nonionic alkanolamides and ethers such as fatty alcohol ethoxylates, propoxylated alcohols, and ethoxylated/propoxylated block polymers are also included in this class. The polyoxyethylene surfactants are the most popular members of the nonionic surfactant class.

[0542] If the surfactant molecule carries a negative charge when it is dissolved or dispersed in water, the surfactant is classified as anionic. Anionic surfactants include carboxylates such as soaps, acyl lactylates, acyl amides of amino acids, esters of sulfuric acid such as alkyl sulfates and ethoxylated alkyl sulfates, sulfonates such as alkyl benzene sulfonates, acyl isethionates, acyl taurates and sulfosuccinates, and phosphates. The most important members of the anionic surfactant class are the alkyl sulfates and the soaps.

[0543] If the surfactant molecule carries a positive charge when it is dissolved or dispersed in water, the surfactant is classified as cationic. Cationic surfactants include quaternary ammonium salts and ethoxylated amines. The quaternary ammonium salts are the most used members of this class.

[0544] If the surfactant molecule has the ability to carry either a positive or negative charge, the surfactant is classified as amphoteric. Amphoteric surfactants include acrylic acid derivatives, substituted alkylamides, N-alkylbetaines and phosphatides.

[0545] The use of surfactants in drug products, formulations and in emulsions has been reviewed (Rieger, in Pharmaceutical Dosage Forms, Marcel Dekker, Inc., New York, N.Y., 1988, p. 285).

[0546] The RNAi agent for use in the methods of the disclosure can also be provided as micellar formulations. “Micelles” are defined herein as a particular type of molecular assembly in which amphipathic molecules are arranged in a spherical structure such that all the hydrophobic portions of the molecules are directed inward, leaving the hydrophilic portions in contact with the surrounding aqueous phase. The converse arrangement exists if the environment is hydrophobic.

[0547] A mixed micellar formulation suitable for delivery through transdermal membranes may be prepared by mixing an aqueous solution of the siRNA composition, an alkali metal C₈ to C22 alkyl sulphate, and a micelle forming compounds. Exemplary micelle forming compounds include lecithin, hyaluronic acid, pharmaceutically acceptable salts of hyaluronic acid, glycolic acid, lactic acid, chamomile extract, cucumber extract, oleic acid, linoleic acid, linolenic acid, monoolein, monooleates, monolaurates, borage oil, evening of primrose oil, menthol, trihydroxy oxo cholanyl glycine and pharmaceutically acceptable salts thereof, glycerin, polyglycerin, lysine, polylysine, triolein, polyoxyethylene ethers and analogues thereof, polidocanol alkyl ethers and analogues thereof, chenodeoxycholate, deoxycholate, and mixtures thereof. The micelle forming compounds may be added at the same time or after addition of the alkali metal alkyl sulphate. Mixed micelles will form with substantially any kind of mixing of the ingredients but vigorous mixing in order to provide smaller size micelles.

[0548] In one method a first micellar composition is prepared which contains the siRNA composition and at least the alkali metal alkyl sulphate. The first micellar composition is then mixed with at least three micelle forming compounds to form a mixed micellar composition. In another method, the micellar composition is prepared by mixing the siRNA composition, the alkali metal alkyl sulphate and at least one of the micelle forming compounds, followed by addition of the remaining micelle forming compounds, with vigorous mixing.

[0549] Phenol or m-cresol may be added to the mixed micellar composition to stabilize the formulation and protect against bacterial growth. Alternatively, phenol or m-cresol may be added with the micelle forming ingredients. An isotonic agent such as glycerin may also be added after formation of the mixed micellar composition.

[0550] For delivery of the micellar formulation as a spray, the formulation can be put into an aerosol dispenser and the dispenser is charged with a propellant. The propellant, which is under pressure, is in liquid form in the dispenser. The ratios of the ingredients are adjusted so that the aqueous and propellant phases become one, i.e., there is one phase. If there are two phases, it is necessary to shake the dispenser prior to dispensing a portion of the contents, e.g., through a metered valve. The dispensed dose of pharmaceutical agent is propelled from the metered valve in a fine spray.

[0551] Propellants may include hydrogen-containing chlorofluorocarbons, hydrogen-containing fluorocarbons, dimethyl ether and diethyl ether. In certain embodiments, IFA 134a (1,1,1,2 tetrafluoroethane) may be used.

[0552] The specific concentrations of the essential ingredients can be determined by relatively straightforward experimentation. For absorption through the oral cavities, it is often desirable to increase, e.g., at least double or triple, the dosage for through injection or administration through the gastrointestinal tract.

### Lipid Particles

[0553] RNAi agents, e.g., dsRNAs of in the disclosure may be fully encapsulated in a lipid formulation, e.g., a LNP, or other nucleic acid-lipid particle.

[0554] As used herein, the term “LNP” refers to a stable nucleic acid-lipid particle. LNPs typically contain a cationic lipid, a non-cationic lipid, and a lipid that prevents aggregation of the particle (e.g., a PEG-lipid conjugate). LNPs are extremely useful for systemic applications, as they exhibit extended circulation lifetimes following intravenous (i.v.) injection and accumulate at distal sites (e.g., sites physically separated from the administration site). LNPs include “pSPLP,” which include an encapsulated condensing agent-nucleic acid complex as set forth in WO 00/03683. The particles of the present disclosure typically have a mean diameter of about 50 nm to about 150 nm, more typically about 60 nm to about 130 nm, more typically about 70 nm to about 110 nm, most typically about 70 nm to about 90 nm, and are substantially nontoxic. In addition, the nucleic acids when present in the nucleic acid-lipid particles of the present disclosure are resistant in aqueous solution to degradation with a nuclease. Nucleic acid-lipid particles and their method of preparation are disclosed in, e.g., U.S. Pat. Nos. 5,976,567; 5,981,501; 6,534,484; 6,586,410; 6,815,432; United States Patent publication No. 2010/0324120 and WO 96/40964.

[0555] In one embodiment, the lipid to drug ratio (mass/mass ratio) (e.g., lipid to dsRNA ratio) will be in the range of from about 1:1 to about 50:1, from about 1:1 to about 25:1, from about 3:1 to about 15:1, from about 4:1 to about 10:1, from about 5:1 to about 9:1, or about 6:1 to about 9:1. Ranges intermediate to the above recited ranges are also contemplated to be part of the disclosure.

[0556] Certain specific LNP formulations for delivery of RNAi agents have been described in the art, including, e.g., “LNP01” formulations as described in, e.g., WO 2008/042973, which is hereby incorporated by reference.

[0557] Additional exemplary lipid-dsRNA formulations are identified in the chart below.

| | | cationic lipid/non-cationic |
|---|---|---|
| | | lipid/cholesterol/PEG-lipid |
| | | conjugate |
| | Ionizable/Cationic Lipid | Lipid:siRNA ratio |
| SNALP-1 | 1,2-Dilinolenyloxy-N,N- | DLinDMA/DPPC/Cholesterol/PEG-cDMA |
| | dimethylaminopropane (DLinDMA) | (57.1/7.1/34.4/1.4) |
| | | lipid:siRNA~7:1 |
| 2-XTC | 2,2-Dilinoleyl-4-dimethylaminoethyl- | XTC/DPPC/Cholesterol/PEG-cDMA |
| | [1,3]-dioxolane (XTC) | 57.1/7.1/34.4/1.4 |
| | | lipid:siRNA~7:1 |
| LNP05 | 2,2-Dilinoleyl-4-dimethylaminoethyl- | XTC/DSPC/Cholesterol/PEG-DMG |
| | [1,3]-dioxolane (XTC) | 57.5/7.5/31.5/3.5 |
| | | lipid:siRNA~6:1 |
| LNP06 | 2,2-Dilinoleyl-4-dimethylaminoethyl- | XTC/DSPC/Cholesterol/PEG-DMG |
| | [1,3]-dioxolane (XTC) | 57.5/7.5/31.5/3.5 |
| | | lipid:siRNA~11:1 |
| LNP07 | 2,2-Dilinoleyl-4-dimethylaminoethyl- | XTC/DSPC/Cholesterol/PEG-DMG |
| | [1,3]-dioxolane (XTC) | 60/7.5/31/1.5, |
| | | lipid:siRNA~6:1 |
| LNP08 | 2,2-Dilinoleyl-4-dimethylaminoethyl- | XTC/DSPC/Cholesterol/PEG-DMG |
| | [1,3]-dioxolane (XTC) | 60/7.5/31/1.5, |
| | | lipid:siRNA~11:1 |
| LNP09 | 2,2-Dilinoleyl-4-dimethylaminoethyl- | XTC/DSPC/Cholesterol/PEG-DMG |
| | [1,3]-dioxolane (XTC) | 50/10/38.5/1.5 |
| | | Lipid:siRNA 10:1 |
| LNP10 | (3aR,5s,6aS)-N,N-dimethyl-2,2- | ALN100/DSPC/Cholesterol/PEG-DMG |
| | di((9Z,12Z)-octadeca-9,12- | 50/10/38.5/1.5 |
| | dienyl)tetrahydro-3aH- | Lipid:siRNA 10:1 |
| | cyclopenta[d][1,3]dioxol-5-amine | |
| | (ALN100) | |
| LNP11 | (6Z,9Z,28Z,31Z)-heptatriaconta- | MC-3/DSPC/Cholesterol/PEG-DMG |
| | 6,9,28,31-tetraen-19-yl 4- | 50/10/38.5/1.5 |
| | (dimethylamino)butanoate (MC3) | Lipid:siRNA 10:1 |
| LNP12 | 1,1′-(2-(4-(2-((2-(bis(2- | Tech G1/DSPC/Cholesterol/PEG-DMG |
| | hydroxydodecyl)amino)ethyl)(2- | 50/10/38.5/1.5 |
| | hydroxydodecyl)amino)ethyl)piperazin- | Lipid:siRNA 10:1 |
| | 1-yl)ethylazanediyl)didodecan-2-ol | |
| | (Tech G1) | |
| LNP13 | XTC | XTC/DSPC/Chol/PEG-DMG |
| | | 50/10/38.5/1.5 |
| | | Lipid:siRNA:33:1 |
| LNP14 | MC3 | MC3/DSPC/Chol/PEG-DMG |
| | | 40/15/40/5 |
| | | Lipid:siRNA:11:1 |
| LNP15 | MC3 | MC3/DSPC/Chol/PEG- |
| | | DSG/GalNAc-PEG-DSG |
| | | 50/10/35/4.5/0.5 |
| | | Lipid:siRNA:11:1 |
| LNP16 | MC3 | MC3/DSPC/Chol/PEG-DMG |
| | | 50/10/38.5/1.5 |
| | | Lipid:siRNA:7:1 |
| LNP17 | MC3 | MC3/DSPC/Chol/PEG-DSG |
| | | 50/10/38.5/1.5 |
| | | Lipid:siRNA:10:1 |
| LNP18 | MC3 | MC3/DSPC/Chol/PEG-DMG |
| | | 50/10/38.5/1.5 |
| | | Lipid:siRNA:12:1 |
| LNP19 | MC3 | MC3/DSPC/Chol/PEG-DMG |
| | | 50/10/35/5 |
| | | Lipid:siRNA:8:1 |
| LNP20 | MC3 | MC3/DSPC/Chol/PEG-DPG |
| | | 50/10/38.5/1.5 |
| | | Lipid:siRNA:10:1 |
| LNP21 | C12-200 | C12-200/DSPC/Chol/PEG-DSG |
| | | 50/10/38.5/1.5 |
| | | Lipid:siRNA:7:1 |
| LNP22 | XTC | XTC/DSPC/Chol/PEG-DSG |
| | | 50/10/38.5/1.5 |
| | | Lipid:siRNA:10:1 |

DSPC: distearoylphosphatidylcholine
DPPC: dipalmitoylphosphatidylcholine
PEG-DMG: PEG-didimyristoyl glycerol (C14-PEG, or PEG-C14) (PEG with avg mol wt of 2000)
PEG-DSG: PEG-distyryl glycerol (C18-PEG, or PEG-C18) (PEG with avg mol wt of 2000)
PEG-cDMA: PEG-carbamoyl-1,2-dimyristyloxypropylamine (PEG with avg mol wt of 2000)
SNALP (1,2-Dilinolenyloxy-N,N-dimethylaminopropane (DLinDMA)) comprising formulations are described in WO 2009/127060, which is hereby incorporated by reference.
XTC comprising formulations are described in WO 2010/088537, the entire contents of which are hereby incorporated herein by reference.
MC3 comprising formulations are described, e.g., in United States Patent Publication No. 2010/0324120, the entire contents of which are hereby incorporated by reference.
ALNY-100 comprising formulations are described in WO 2010/054406, the entire contents of which are hereby incorporated herein by reference.
C12-200 comprising formulations are described in WO 2010/129709, the entire contents of which are hereby incorporated herein by reference.

[0558] Compositions and formulations for oral administration include powders or granules, microparticulates, nanoparticulates, suspensions or solutions in water or non-aqueous media, capsules, gel capsules, sachets, tablets or minitablets. Thickeners, flavoring agents, diluents, emulsifiers, dispersing aids or binders can be desirable. In some embodiments, oral formulations are those in which dsRNAs featured in the disclosure are administered in conjunction with one or more penetration enhancer surfactants and chelators. Suitable surfactants include fatty acids or esters or salts thereof, bile acids or salts thereof. Suitable bile acids/salts include chenodeoxycholic acid (CDCA) and ursodeoxychenodeoxycholic acid (UDCA), cholic acid, dehydrocholic acid, deoxycholic acid, glucholic acid, glycholic acid, glycodeoxycholic acid, taurocholic acid, taurodeoxycholic acid, sodium tauro-24,25-dihydro-fusidate and sodium glycodihydrofusidate. Suitable fatty acids include arachidonic acid, undecanoic acid, oleic acid, lauric acid, caprylic acid, capric acid, myristic acid, palmitic acid, stearic acid, linoleic acid, linolenic acid, dicaprate, tricaprate, monoolein, dilaurin, glyceryl 1-monocaprate, 1-dodecylazacycloheptan-2-one, an acylcarnitine, an acylcholine, or a monoglyceride, a diglyceride or a pharmaceutically acceptable salt thereof (e.g., sodium). In some embodiments, combinations of penetration enhancers are used, for example, fatty acids/salts in combination with bile acids/salts. One exemplary combination is the sodium salt of lauric acid, capric acid and UDCA. Further penetration enhancers include polyoxyethylene-9-lauryl ether, polyoxyethylene-20-cetyl ether. DsRNAs featured in the disclosure can be delivered orally, in granular form including sprayed dried particles, or complexed to form micro or nanoparticles. DsRNA complexing agents include poly-amino acids; polyimines; polyacrylates; polyalkylacrylates, polyoxethanes, polyalkylcyanoacrylates; cationized gelatins, albumins, starches, acrylates, polyethyleneglycols (PEG) and starches; polyalkylcyanoacrylates; DEAE-derivatized polyimines, pollulans, celluloses and starches. Suitable complexing agents include chitosan, N-trimethylchitosan, poly-L-lysine, polyhistidine, polyornithine, polyspermines, protamine, polyvinylpyridine, polythiodiethylaminomethylethylene P(TDAE), polyaminostyrene (e.g., p-amino), poly(methylcyanoacrylate), poly(ethylcyanoacrylate), poly(butylcyanoacrylate), poly(isobutylcyanoacrylate), poly(isohexylcynaoacrylate), DEAE-methacrylate, DEAE-hexylacrylate, DEAE-acrylamide, DEAE-albumin and DEAE-dextran, polymethylacrylate, polyhexylacrylate, poly(D,L-lactic acid), poly(DL-lactic-co-glycolic acid (PLGA), alginate, and polyethyleneglycol (PEG). Oral formulations for dsRNAs and their preparation are described in detail in U.S. Pat. No. 6,887,906, U.S. 2003/0027780, and U.S. Pat. No. 6,747,014, each of which is incorporated herein by reference.

[0559] Compositions and formulations for parenteral, intraparenchymal (into the brain), intrathecal, intraventricular or intrahepatic administration can include sterile aqueous solutions which can also contain buffers, diluents and other suitable additives such as, but not limited to, penetration enhancers, carrier compounds and other pharmaceutically acceptable carriers or excipients.

[0560] Pharmaceutical compositions of the present disclosure include, but are not limited to, solutions, emulsions, and liposome-containing formulations. These compositions can be generated from a variety of components that include, but are not limited to, preformed liquids, self-emulsifying solids and self-emulsifying semisolids. Particularly preferred are formulations that target the brain when treating APP-associated diseases or disorders characterized by enlarged neuronal cell endosomes.

[0561] The pharmaceutical formulations of the present disclosure, which can conveniently be presented in unit dosage form, can be prepared according to conventional techniques well known in the pharmaceutical industry. Such techniques include the step of bringing into association the active ingredients with the pharmaceutical carrier(s) or excipient(s). In general, the formulations are prepared by uniformly and intimately bringing into association the active ingredients with liquid carriers or finely divided solid carriers or both, and then, if necessary, shaping the product.

[0562] The compositions of the present disclosure can be formulated into any of many possible dosage forms such as, but not limited to, tablets, capsules, gel capsules, liquid syrups, soft gels, suppositories, and enemas. The compositions of the present disclosure can also be formulated as suspensions in aqueous, non-aqueous or mixed media. Aqueous suspensions can further contain substances which increase the viscosity of the suspension including, for example, sodium carboxymethylcellulose, sorbitol or dextran. The suspension can also contain stabilizers.

### Additional Formulations

i. Emulsions

[0563] The compositions of the present disclosure can be prepared and formulated as emulsions. Emulsions are typically heterogeneous systems of one liquid dispersed in another in the form of droplets usually exceeding 0.1p m in diameter (see e.g., Ansel's Pharmaceutical Dosage Forms and Drug Delivery Systems, Allen, L V., Popovich N G., and Ansel H C., 2004, Lippincott Williams & Wilkins (8th ed.), New York, NY; Idson, in Pharmaceutical Dosage Forms, Lieberman, Rieger and Banker (Eds.), 1988, Marcel Dekker, Inc., New York, N.Y., volume 1, p. 199; Rosoff, in Pharmaceutical Dosage Forms, Lieberman, Rieger and Banker (Eds.), 1988, Marcel Dekker, Inc., New York, N.Y., Volume 1, p. 245; Block in Pharmaceutical Dosage Forms, Lieberman, Rieger and Banker (Eds.), 1988, Marcel Dekker, Inc., New York, N.Y., volume 2, p. 335; Higuchi et al., in Remington's Pharmaceutical Sciences, Mack Publishing Co., Easton, Pa., 1985, p. 301). Emulsions are often biphasic systems comprising two immiscible liquid phases intimately mixed and dispersed with each other. In general, emulsions can be of either the water-in-oil (w/o) or the oil-in-water (o/w) variety. When an aqueous phase is finely divided into and dispersed as minute droplets into a bulk oily phase, the resulting composition is called a water-in-oil (w/o) emulsion. Alternatively, when an oily phase is finely divided into and dispersed as minute droplets into a bulk aqueous phase, the resulting composition is called an oil-in-water (o/w) emulsion. Emulsions can contain additional components in addition to the dispersed phases, and the active drug which can be present as a solution in either aqueous phase, oily phase or itself as a separate phase. Pharmaceutical excipients such as emulsifiers, stabilizers, dyes, and anti-oxidants can also be present in emulsions as needed. Pharmaceutical emulsions can also be multiple emulsions that are comprised of more than two phases such as, for example, in the case of oil-in-water-in-oil (o/w/o) and water-in-oil-in-water (w/o/w) emulsions. Such complex formulations often provide certain advantages that simple binary emulsions do not. Multiple emulsions in which individual oil droplets of an o/w emulsion enclose small water droplets constitute a w/o/w emulsion. Likewise, a system of oil droplets enclosed in globules of water stabilized in an oily continuous phase provides an o/w/o emulsion.

[0564] Emulsions are characterized by little or no thermodynamic stability. Often, the dispersed or discontinuous phase of the emulsion is well dispersed into the external or continuous phase and maintained in this form through the means of emulsifiers or the viscosity of the formulation. Either of the phases of the emulsion can be a semisolid or a solid, as is the case of emulsion-style ointment bases and creams. Other means of stabilizing emulsions entail the use of emulsifiers that can be incorporated into either phase of the emulsion. Emulsifiers can broadly be classified into four categories: synthetic surfactants, naturally occurring emulsifiers, absorption bases, and finely dispersed solids (see e.g., Ansel's Pharmaceutical Dosage Forms and Drug Delivery Systems, Allen, L V., Popovich N G., and Ansel H C., 2004, Lippincott Williams & Wilkins (8th ed.), New York, NY; Idson, in Pharmaceutical Dosage Forms, Lieberman, Rieger and Banker (Eds.), 1988, Marcel Dekker, Inc., New York, N.Y., volume 1, p. 199).

[0565] Synthetic surfactants, also known as surface active agents, have found wide applicability in the formulation of emulsions and have been reviewed in the literature (see e.g., Ansel's Pharmaceutical Dosage Forms and Drug Delivery Systems, Allen, L V., Popovich N G., and Ansel H C., 2004, Lippincott Williams & Wilkins (8th ed.), New York, NY; Rieger, in Pharmaceutical Dosage Forms, Lieberman, Rieger and Banker (Eds.), 1988, Marcel Dekker, Inc., New York, N.Y., volume 1, p. 285; Idson, in Pharmaceutical Dosage Forms, Lieberman, Rieger and Banker (Eds.), Marcel Dekker, Inc., New York, N.Y., 1988, volume 1, p. 199). Surfactants are typically amphiphilic and comprise a hydrophilic and a hydrophobic portion. The ratio of the hydrophilic to the hydrophobic nature of the surfactant has been termed the hydrophile/lipophile balance (HLB) and is a valuable tool in categorizing and selecting surfactants in the preparation of formulations. Surfactants can be classified into different classes based on the nature of the hydrophilic group: nonionic, anionic, cationic and amphoteric (see e.g., Ansel's Pharmaceutical Dosage Forms and Drug Delivery Systems, Allen, L V., Popovich N G., and Ansel H C., 2004, Lippincott Williams & Wilkins (8th ed.), New York, NY Rieger, in Pharmaceutical Dosage Forms, Lieberman, Rieger and Banker (Eds.), 1988, Marcel Dekker, Inc., New York, N.Y., volume 1, p. 285).

[0566] Naturally occurring emulsifiers used in emulsion formulations include lanolin, beeswax, phosphatides, lecithin and acacia. Absorption bases possess hydrophilic properties such that they can soak up water to form w/o emulsions yet retain their semisolid consistencies, such as anhydrous lanolin and hydrophilic petrolatum. Finely divided solids have also been used as good emulsifiers especially in combination with surfactants and in viscous preparations. These include polar inorganic solids, such as heavy metal hydroxides, nonswelling clays such as bentonite, attapulgite, hectorite, kaolin, montmorillonite, colloidal aluminum silicate and colloidal magnesium aluminum silicate, pigments and nonpolar solids such as carbon or glyceryl tristearate.

[0567] A large variety of non-emulsifying materials are also included in emulsion formulations and contribute to the properties of emulsions. These include fats, oils, waxes, fatty acids, fatty alcohols, fatty esters, humectants, hydrophilic colloids, preservatives and antioxidants (Block, in Pharmaceutical Dosage Forms, Lieberman, Rieger and Banker (Eds.), 1988, Marcel Dekker, Inc., New York, N.Y., volume 1, p. 335; Idson, in Pharmaceutical Dosage Forms, Lieberman, Rieger and Banker (Eds.), 1988, Marcel Dekker, Inc., New York, N.Y., volume 1, p. 199).

[0568] Hydrophilic colloids or hydrocolloids include naturally occurring gums and synthetic polymers such as polysaccharides (for example, acacia, agar, alginic acid, carrageenan, guar gum, karaya gum, and tragacanth), cellulose derivatives (for example, carboxymethylcellulose and carboxypropylcellulose), and synthetic polymers (for example, carbomers, cellulose ethers, and carboxyvinyl polymers). These disperse or swell in water to form colloidal solutions that stabilize emulsions by forming strong interfacial films around the dispersed-phase droplets and by increasing the viscosity of the external phase.

[0569] Since emulsions often contain a number of ingredients such as carbohydrates, proteins, sterols and phosphatides that can readily support the growth of microbes, these formulations often incorporate preservatives. Commonly used preservatives included in emulsion formulations include methyl paraben, propyl paraben, quaternary ammonium salts, benzalkonium chloride, esters of p-hydroxybenzoic acid, and boric acid. Antioxidants are also commonly added to emulsion formulations to prevent deterioration of the formulation. Antioxidants used can be free radical scavengers such as tocopherols, alkyl gallates, butylated hydroxyanisole, butylated hydroxytoluene, or reducing agents such as ascorbic acid and sodium metabisulfite, and antioxidant synergists such as citric acid, tartaric acid, and lecithin.

[0570] The application of emulsion formulations via dermatological, oral and parenteral routes and methods for their manufacture have been reviewed in the literature (see e.g., Ansel's Pharmaceutical Dosage Forms and Drug Delivery Systems, Allen, L V., Popovich N G., and Ansel H C., 2004, Lippincott Williams & Wilkins (8th ed.), New York, NY; Idson, in Pharmaceutical Dosage Forms, Lieberman, Rieger and Banker (Eds.), 1988, Marcel Dekker, Inc., New York, N.Y., volume 1, p. 199). Emulsion formulations for oral delivery have been very widely used because of ease of formulation, as well as efficacy from an absorption and bioavailability standpoint (see e.g., Ansel's Pharmaceutical Dosage Forms and Drug Delivery Systems, Allen, L V., Popovich N G., and Ansel H C., 2004, Lippincott Williams & Wilkins (8th ed.), New York, NY; Rosoff, in Pharmaceutical Dosage Forms, Lieberman, Rieger and Banker (Eds.), 1988, Marcel Dekker, Inc., New York, N.Y., volume 1, p. 245; Idson, in Pharmaceutical Dosage Forms, Lieberman, Rieger and Banker (Eds.), 1988, Marcel Dekker, Inc., New York, N.Y., volume 1, p. 199). Mineral-oil base laxatives, oil-soluble vitamins and high fat nutritive preparations are among the materials that have commonly been administered orally as o/w emulsions.

ii. Microemulsions

[0571] In one embodiment of the present disclosure, the compositions of RNAi agents and nucleic acids are formulated as microemulsions. A microemulsion can be defined as a system of water, oil and amphiphile which is a single optically isotropic and thermodynamically stable liquid solution (see e.g., Ansel's Pharmaceutical Dosage Forms and Drug Delivery Systems, Allen, L V., Popovich N G., and Ansel H C., 2004, Lippincott Williams & Wilkins (8th ed.), New York, NY; Rosoff, in Pharmaceutical Dosage Forms, Lieberman, Rieger and Banker (Eds.), 1988, Marcel Dekker, Inc., New York, N.Y., volume 1, p. 245). Typically, microemulsions are systems that are prepared by first dispersing an oil in an aqueous surfactant solution and then adding a sufficient amount of a fourth component, generally an intermediate chain-length alcohol to form a transparent system. Therefore, microemulsions have also been described as thermodynamically stable, isotropically clear dispersions of two immiscible liquids that are stabilized by interfacial films of surface-active molecules (Leung and Shah, in: Controlled Release of Drugs: Polymers and Aggregate Systems, Rosoff, M., Ed., 1989, VCH Publishers, New York, pages 185-215). Microemulsions commonly are prepared via a combination of three to five components that include oil, water, surfactant, cosurfactant and electrolyte. Whether the microemulsion is of the water-in-oil (w/o) or an oil-in-water (o/w) type is dependent on the properties of the oil and surfactant used, and on the structure and geometric packing of the polar heads and hydrocarbon tails of the surfactant molecules (Schott, in Remington's Pharmaceutical Sciences, Mack Publishing Co., Easton, Pa., 1985, p. 271).

[0572] The phenomenological approach utilizing phase diagrams has been extensively studied and has yielded a comprehensive knowledge, to one skilled in the art, of how to formulate microemulsions (see e.g., Ansel's Pharmaceutical Dosage Forms and Drug Delivery Systems, Allen, L V., Popovich N G., and Ansel H C., 2004, Lippincott Williams & Wilkins (8th ed.), New York, NY; Rosoff, in Pharmaceutical Dosage Forms, Lieberman, Rieger and Banker (Eds.), 1988, Marcel Dekker, Inc., New York, N.Y., volume 1, p. 245; Block, in Pharmaceutical Dosage Forms, Lieberman, Rieger and Banker (Eds.), 1988, Marcel Dekker, Inc., New York, N.Y., volume 1, p. 335). Compared to conventional emulsions, microemulsions offer the advantage of solubilizing water-insoluble drugs in a formulation of thermodynamically stable droplets that are formed spontaneously.

[0573] Surfactants used in the preparation of microemulsions include, but are not limited to, ionic surfactants, non-ionic surfactants, Brij 96, polyoxyethylene oleyl ethers, polyglycerol fatty acid esters, tetraglycerol monolaurate (ML310), tetraglycerol monooleate (M0310), hexaglycerol monooleate (P0310), hexaglycerol pentaoleate (P0500), decaglycerol monocaprate (MCA750), decaglycerol monooleate (M0750), decaglycerol sequioleate (S0750), decaglycerol decaoleate (DA0750), alone or in combination with cosurfactants. The cosurfactant, usually a short-chain alcohol such as ethanol, 1-propanol, and 1-butanol, serves to increase the interfacial fluidity by penetrating into the surfactant film and consequently creating a disordered film because of the void space generated among surfactant molecules. Microemulsions can, however, be prepared without the use of cosurfactants and alcohol-free self-emulsifying microemulsion systems are known in the art. The aqueous phase can typically be, but is not limited to, water, an aqueous solution of the drug, glycerol, PEG300, PEG400, polyglycerols, propylene glycols, and derivatives of ethylene glycol. The oil phase can include, but is not limited to, materials such as Captex 300, Captex 355, Capmul MCM, fatty acid esters, medium chain (C8-C12) mono, di, and tri-glycerides, polyoxyethylated glyceryl fatty acid esters, fatty alcohols, polyglycolized glycerides, saturated polyglycolized C8-C10 glycerides, vegetable oils and silicone oil.

[0574] Microemulsions are particularly of interest from the standpoint of drug solubilization and the enhanced absorption of drugs. Lipid based microemulsions (both o/w and w/o) have been proposed to enhance the oral bioavailability of drugs, including peptides (see e.g., U.S. Pat. Nos. 6,191,105; 7,063,860; 7,070,802; 7,157,099; Constantinides et al., Pharmaceutical Research, 1994, 11, 1385-1390; Ritschel, Meth. Find. Exp. Clin. Pharmacol., 1993, 13, 205). Microemulsions afford advantages of improved drug solubilization, protection of drug from enzymatic hydrolysis, possible enhancement of drug absorption due to surfactant-induced alterations in membrane fluidity and permeability, ease of preparation, ease of oral administration over solid dosage forms, improved clinical potency, and decreased toxicity (see e.g., U.S. Pat. Nos. 6,191,105; 7,063,860; 7,070,802; 7,157,099; Constantinides et al., Pharmaceutical Research, 1994, 11, 1385; Ho et al., J. Pharm. Sci., 1996, 85, 138-143). Often microemulsions can form spontaneously when their components are brought together at ambient temperature. This can be particularly advantageous when formulating thermolabile drugs, peptides or RNAi agents. Microemulsions have also been effective in the transdermal delivery of active components in both cosmetic and pharmaceutical applications. It is expected that the microemulsion compositions and formulations of the present disclosure will facilitate the increased systemic absorption of RNAi agents and nucleic acids from the gastrointestinal tract, as well as improve the local cellular uptake of RNAi agents and nucleic acids.

[0575] Microemulsions of the present disclosure can also contain additional components and additives such as sorbitan monostearate (Grill 3), Labrasol, and penetration enhancers to improve the properties of the formulation and to enhance the absorption of the RNAi agents and nucleic acids of the present disclosure. Penetration enhancers used in the microemulsions of the present disclosure can be classified as belonging to one of five broad categories—surfactants, fatty acids, bile salts, chelating agents, and non-chelating non-surfactants (Lee et al., Critical Reviews in Therapeutic Drug Carrier Systems, 1991, p. 92). Each of these classes has been discussed above.

iii. Microparticles

[0576] An RNAi agent of the disclosure may be incorporated into a particle, e.g., a microparticle. Microparticles can be produced by spray-drying, but may also be produced by other methods including lyophilization, evaporation, fluid bed drying, vacuum drying, or a combination of these techniques.

iv. Penetration Enhancers

[0577] In one embodiment, the present disclosure employs various penetration enhancers to effect the efficient delivery of nucleic acids, particularly RNAi agents, to the skin of animals. Most drugs are present in solution in both ionized and nonionized forms. However, usually only lipid soluble or lipophilic drugs readily cross cell membranes. It has been discovered that even non-lipophilic drugs can cross cell membranes if the membrane to be crossed is treated with a penetration enhancer. In addition to aiding the diffusion of non-lipophilic drugs across cell membranes, penetration enhancers also enhance the permeability of lipophilic drugs.

[0578] Penetration enhancers can be classified as belonging to one of five broad categories, i.e., surfactants, fatty acids, bile salts, chelating agents, and non-chelating non-surfactants (see e.g., Malmsten, M. Surfactants and polymers in drug delivery, Informa Health Care, New York, NY, 2002; Lee et al., Critical Reviews in Therapeutic Drug Carrier Systems, 1991, p. 92). Each of the above-mentioned classes of penetration enhancers are described below in greater detail.

[0579] Surfactants (or “surface-active agents”) are chemical entities which, when dissolved in an aqueous solution, reduce the surface tension of the solution or the interfacial tension between the aqueous solution and another liquid, with the result that absorption of RNAi agents through the mucosa is enhanced. In addition to bile salts and fatty acids, these penetration enhancers include, for example, sodium lauryl sulfate, polyoxyethylene-9-lauryl ether and polyoxyethylene-20-cetyl ether) (see e.g., Malmsten, M. Surfactants and polymers in drug delivery, Informa Health Care, New York, NY, 2002; Lee et al., Critical Reviews in Therapeutic Drug Carrier Systems, 1991, p. 92); and perfluorochemical emulsions, such as FC-43. Takahashi et al., J. Pharm. Pharmacol., 1988, 40, 252).

[0580] Various fatty acids and their derivatives which act as penetration enhancers include, for example, oleic acid, lauric acid, capric acid (n-decanoic acid), myristic acid, palmitic acid, stearic acid, linoleic acid, linolenic acid, dicaprate, tricaprate, monoolein (1-monooleoyl-rac-glycerol), dilaurin, caprylic acid, arachidonic acid, glycerol 1-monocaprate, 1-dodecylazacycloheptan-2-one, acylcarnitines, acylcholines, C₁₋₂₀ alkyl esters thereof (e.g., methyl, isopropyl and t-butyl), and mono- and di-glycerides thereof (i.e., oleate, laurate, caprate, myristate, palmitate, stearate, linoleate, etc.) (see e.g., Touitou, E., et al. Enhancement in Drug Delivery, CRC Press, Danvers, MA, 2006; Lee et al., Critical Reviews in Therapeutic Drug Carrier Systems, 1991, p. 92; Muranishi, Critical Reviews in Therapeutic Drug Carrier Systems, 1990, 7, 1-33; El Hariri et al., J. Pharm. Pharmacol., 1992, 44, 651-654).

[0581] The physiological role of bile includes the facilitation of dispersion and absorption of lipids and fat-soluble vitamins (see e.g., Malmsten, M. Surfactants and polymers in drug delivery, Informa Health Care, New York, NY, 2002; Brunton, Chapter 38 in: Goodman & Gilman's The Pharmacological Basis of Therapeutics, 9th Ed., Hardman et al. Eds., McGraw-Hill, New York, 1996, pp. 934-935). Various natural bile salts, and their synthetic derivatives, act as penetration enhancers. Thus the term “bile salts” includes any of the naturally occurring components of bile as well as any of their synthetic derivatives. Suitable bile salts include, for example, cholic acid (or its pharmaceutically acceptable sodium salt, sodium cholate), dehydrocholic acid (sodium dehydrocholate), deoxycholic acid (sodium deoxycholate), glucholic acid (sodium glucholate), glycholic acid (sodium glycocholate), glycodeoxycholic acid (sodium glycodeoxycholate), taurocholic acid (sodium taurocholate), taurodeoxycholic acid (sodium taurodeoxycholate), chenodeoxycholic acid (sodium chenodeoxycholate), ursodeoxycholic acid (UDCA), sodium tauro-24,25-dihydro-fusidate (STDHF), sodium glycodihydrofusidate and polyoxyethylene-9-lauryl ether (POE) (see e.g., Malmsten, M. Surfactants and polymers in drug delivery, Informa Health Care, New York, NY, 2002; Lee et al., Critical Reviews in Therapeutic Drug Carrier Systems, 1991, page 92; Swinyard, Chapter 39 In: Remington's Pharmaceutical Sciences, 18th Ed., Gennaro, ed., Mack Publishing Co., Easton, Pa., 1990, pages 782-783; Muranishi, Critical Reviews in Therapeutic Drug Carrier Systems, 1990, 7, 1-33; Yamamoto et al., J. Pharm. Exp. Ther., 1992, 263, 25; Yamashita et al., J. Pharm. Sci., 1990, 79, 579-583).

[0582] Chelating agents, as used in connection with the present disclosure, can be defined as compounds that remove metallic ions from solution by forming complexes therewith, with the result that absorption of RNAi agents through the mucosa is enhanced. With regards to their use as penetration enhancers in the present disclosure, chelating agents have the added advantage of also serving as DNase inhibitors, as most characterized DNA nucleases require a divalent metal ion for catalysis and are thus inhibited by chelating agents (Jarrett, J. Chromatogr., 1993, 618, 315-339). Suitable chelating agents include but are not limited to disodium ethylenediaminetetraacetate (EDTA), citric acid, salicylates (e.g., sodium salicylate, 5-methoxysalicylate and homovanilate), N-acyl derivatives of collagen, laureth-9 and N-amino acyl derivatives of beta-diketones (enamines)(see e.g., Katdare, A. et al., Excipient development for pharmaceutical, biotechnology, and drug delivery, CRC Press, Danvers, MA, 2006; Lee et al., Critical Reviews in Therapeutic Drug Carrier Systems, 1991, page 92; Muranishi, Critical Reviews in Therapeutic Drug Carrier Systems, 1990, 7, 1-33; Buur et al., J. Control Rel., 1990, 14, 43-51).

[0583] As used herein, non-chelating non-surfactant penetration enhancing compounds can be defined as compounds that demonstrate insignificant activity as chelating agents or as surfactants but that nonetheless enhance absorption of RNAi agents through the alimentary mucosa (see e.g., Muranishi, Critical Reviews in Therapeutic Drug Carrier Systems, 1990, 7, 1-33). This class of penetration enhancers includes, for example, unsaturated cyclic ureas, 1-alkyl- and 1-alkenylazacyclo-alkanone derivatives (Lee et al., Critical Reviews in Therapeutic Drug Carrier Systems, 1991, page 92); and non-steroidal anti-inflammatory agents such as diclofenac sodium, indomethacin and phenylbutazone (Yamashita et al., J. Pharm. Pharmacol., 1987, 39, 621-626).

[0584] Agents that enhance uptake of RNAi agents at the cellular level can also be added to the pharmaceutical and other compositions of the present disclosure. For example, cationic lipids, such as lipofectin (Junichi et al, U.S. Pat. No. 5,705,188), cationic glycerol derivatives, and polycationic molecules, such as polylysine (WO 97/30731), are also known to enhance the cellular uptake of dsRNAs.

[0585] Other agents can be utilized to enhance the penetration of the administered nucleic acids, including glycols such as ethylene glycol and propylene glycol, pyrrols such as 2-pyrrol, azones, and terpenes such as limonene and menthone.

vi. Excipients

[0586] In contrast to a carrier compound, a “pharmaceutical carrier” or “excipient” is a pharmaceutically acceptable solvent, suspending agent or any other pharmacologically inert vehicle for delivering one or more nucleic acids to an animal. The excipient can be liquid or solid and is selected, with the planned manner of administration in mind, so as to provide for the desired bulk, consistency, etc., when combined with a nucleic acid and the other components of a given pharmaceutical composition. Typical pharmaceutical carriers include, but are not limited to, binding agents (e.g., pregelatinized maize starch, polyvinylpyrrolidone or hydroxypropyl methylcellulose, etc.); fillers (e.g., lactose and other sugars, microcrystalline cellulose, pectin, gelatin, calcium sulfate, ethyl cellulose, polyacrylates or calcium hydrogen phosphate, etc.); lubricants (e.g., magnesium stearate, talc, silica, colloidal silicon dioxide, stearic acid, metallic stearates, hydrogenated vegetable oils, corn starch, polyethylene glycols, sodium benzoate, sodium acetate, etc.); disintegrants (e.g., starch, sodium starch glycolate, etc.); and wetting agents (e.g., sodium lauryl sulphate, etc).

[0587] Pharmaceutically acceptable organic or inorganic excipients suitable for non-parenteral administration which do not deleteriously react with nucleic acids can also be used to formulate the compositions of the present disclosure. Suitable pharmaceutically acceptable carriers include, but are not limited to, water, salt solutions, alcohols, polyethylene glycols, gelatin, lactose, amylose, magnesium stearate, talc, silicic acid, viscous paraffin, hydroxymethylcellulose, polyvinylpyrrolidone and the like.

[0588] Formulations for topical administration of nucleic acids can include sterile and non-sterile aqueous solutions, non-aqueous solutions in common solvents such as alcohols, or solutions of the nucleic acids in liquid or solid oil bases. The solutions can also contain buffers, diluents and other suitable additives. Pharmaceutically acceptable organic or inorganic excipients suitable for non-parenteral administration which do not deleteriously react with nucleic acids can be used.

[0589] Suitable pharmaceutically acceptable excipients include, but are not limited to, water, salt solutions, alcohol, polyethylene glycols, gelatin, lactose, amylose, magnesium stearate, talc, silicic acid, viscous paraffin, hydroxymethylcellulose, polyvinylpyrrolidone and the like.

vii. Other Components

[0590] The compositions of the present disclosure can additionally contain other adjunct components conventionally found in pharmaceutical compositions, at their art-established usage levels. Thus, for example, the compositions can contain additional, compatible, pharmaceutically-active materials such as, for example, antipruritics, astringents, local anesthetics or anti-inflammatory agents, or can contain additional materials useful in physically formulating various dosage forms of the compositions of the present disclosure, such as dyes, flavoring agents, preservatives, antioxidants, opacifiers, thickening agents and stabilizers. However, such materials, when added, should not unduly interfere with the biological activities of the components of the compositions of the present disclosure. The formulations can be sterilized and, if desired, mixed with auxiliary agents, e.g., lubricants, preservatives, stabilizers, wetting agents, emulsifiers, salts for influencing osmotic pressure, buffers, colorings, flavorings or aromatic substances and the like which do not deleteriously interact with the nucleic acid(s) of the formulation.

[0591] Aqueous suspensions can contain substances which increase the viscosity of the suspension including, for example, sodium carboxymethylcellulose, sorbitol or dextran. The suspension can also contain stabilizers.

[0592] In some embodiments, pharmaceutical compositions featured in the disclosure include (a) one or more RNAi agents and (b) one or more agents which function by a non-RNAi mechanism and which are useful in treating an APP-associated neurodegenerative disorder.

[0593] Examples of such agents include, but are not limited to acetylcholinesterase inhibitors, NMDA receptor antagonists, gamma secretase inhibitors, antibodies directed against Abeta (e.g., aducanumab), agents directed against the tau protein anti-synuclein antibodies and fumarate compounds, among others disclosed herein or otherwise known in the art.

[0594] Toxicity and therapeutic efficacy of such compounds can be determined by standard pharmaceutical procedures in cell cultures or experimental animals, e.g., for determining the LD₅₀ (the dose lethal to 50% of the population) and the ED₅₀ (the dose therapeutically effective in 50% of the population). The dose ratio between toxic and therapeutic effects is the therapeutic index and it can be expressed as the ratio LD₅₀/ED₅₀. Compounds that exhibit high therapeutic indices are preferred.

[0595] The data obtained from cell culture assays and animal studies can be used in formulating a range of dosage for use in humans. The dosage of compositions featured herein in the disclosure lies generally within a range of circulating concentrations that include the ED₅₀ with little or no toxicity. The dosage can vary within this range depending upon the dosage form employed and the route of administration utilized. For any compound used in the methods featured in the disclosure, the therapeutically effective dose can be estimated initially from cell culture assays. A dose can be formulated in animal models to achieve a circulating plasma concentration range of the compound or, when appropriate, of the polypeptide product of a target sequence (e.g., achieving a decreased concentration of the polypeptide) that includes the IC₅₀ (i.e., the concentration of the test compound which achieves a half-maximal inhibition of symptoms) as determined in cell culture. Such information can be used to more accurately determine useful doses in humans. Levels in plasma can be measured, for example, by high performance liquid chromatography.

[0596] In addition to their administration, as discussed above, the RNAi agents featured in the disclosure can be administered in combination with other known agents effective in treatment of pathological processes mediated by nucleotide repeat expression. In any event, the administering physician can adjust the amount and timing of RNAi agent administration on the basis of results observed using standard measures of efficacy known in the art or described herein.

### VII. Kits

[0597] In certain aspects, the instant disclosure provides kits that include a suitable container containing a pharmaceutical formulation of a siRNA compound, e.g., a double-stranded siRNA compound, or siRNA compound, (e.g., a precursor, e.g., a larger siRNA compound which can be processed into a siRNA compound, or a DNA which encodes an siRNA compound, e.g., a double-stranded siRNA compound, or siRNA compound, or precursor thereof). In certain embodiments the individual components of the pharmaceutical formulation may be provided in one container. Alternatively, it may be desirable to provide the components of the pharmaceutical formulation separately in two or more containers, e.g., one container for a siRNA compound preparation, and at least another for a carrier compound. The kit may be packaged in a number of different configurations such as one or more containers in a single box. The different components can be combined, e.g., according to instructions provided with the kit. The components can be combined according to a method described herein, e.g., to prepare and administer a pharmaceutical composition. The kit can also include a delivery device.

### VIII. Methods for Inhibiting APP Expression

[0598] The present disclosure also provides methods of inhibiting expression of an APP gene in a cell. The methods include contacting a cell with an RNAi agent, e.g., double stranded RNAi agent, in an amount effective to inhibit expression of APP in the cell, thereby inhibiting expression of APP in the cell. In certain embodiments of the disclosure, APP is inhibited preferentially in CNS (e.g., brain) cells. In other embodiments of the disclosure, APP is inhibited preferentially in the liver (e.g., hepatocytes). In certain embodiments of the disclosure, APP is inhibited in CNS (e.g., brain) cells and in liver (e.g., hepatocytes) cells.

[0599] Contacting of a cell with an RNAi agent, e.g., a double stranded RNAi agent, may be done in vitro or in vivo. Contacting a cell in vivo with the RNAi agent includes contacting a cell or group of cells within a subject, e.g., a human subject, with the RNAi agent. Combinations of in vitro and in vivo methods of contacting a cell are also possible.

[0600] Contacting a cell may be direct or indirect, as discussed above. Furthermore, contacting a cell may be accomplished via a targeting ligand, including any ligand described herein or known in the art. In some embodiments, the targeting ligand is a carbohydrate moiety, e.g., a GalNAc ligand, or any other ligand that directs the RNAi agent to a site of interest.

[0601] The term “inhibiting,” as used herein, is used interchangeably with “reducing,” “silencing,” “downregulating,” “suppressing” and other similar terms, and includes any level of inhibition. In certain embodiments, a level of inhibition, e.g., for an RNAi agent of the instant disclosure, can be assessed in cell culture conditions, e.g., wherein cells in cell culture are transfected via Lipofectamine™-mediated transfection at a concentration in the vicinity of a cell of 10 nM or less, 1 nM or less, etc. Knockdown of a given RNAi agent can be determined via comparison of pre-treated levels in cell culture versus post-treated levels in cell culture, optionally also comparing against cells treated in parallel with a scrambled or other form of control RNAi agent. Knockdown in cell culture of, e.g., optionally 50% or more, can thereby be identified as indicative of “inhibiting” or “reducing”, “downregulating” or “suppressing”, etc. having occurred. It is expressly contemplated that assessment of targeted mRNA or encoded protein levels (and therefore an extent of “inhibiting”, etc. caused by an RNAi agent of the disclosure) can also be assessed in in vivo systems for the RNAi agents of the instant disclosure, under properly controlled conditions as described in the art.

[0602] The phrase “inhibiting expression of an APP gene” or “inhibiting expression of APP,” as used herein, includes inhibition of expression of any APP gene (such as, e.g., a mouse APP gene, a rat APP gene, a monkey APP gene, or a human APP gene) as well as variants or mutants of an APP gene that encode an APP protein. Thus, the APP gene may be a wild-type APP gene, a mutant APP gene, or a transgenic APP gene in the context of a genetically manipulated cell, group of cells, or organism.

[0603] “Inhibiting expression of an APP gene” includes any level of inhibition of an APP gene, e.g., at least partial suppression of the expression of an APP gene, such as an inhibition by at least 20%. In certain embodiments, inhibition is by at least 30%, at least 40%, optionally at least 50%, at least about 60%, at least 70%, at least about 80%, at least 85%, at least 90%, at least 95%, at least 96%, at least 97%, at least 98%, or at least 99%; or to below the level of detection of the assay method.

[0604] The expression of an APP gene may be assessed based on the level of any variable associated with APP gene expression, e.g., APP mRNA level or APP (osteopontin) protein level, or, for example, the level of amyloid plaque deposition or dopamine signaling observed in the frontal lobe, entorhinal cortex of medial temporal lobe, hippocampus, cerebral cortex, basal ganglia, substantia nigra or other brain region of a treated subject, or by observation of symptoms (e.g., cognition difficulties, dementia, depression, spasticity, tremors, walking difficulties, etc.) of APP-associated disease as an indicator of APP gene activity.

[0605] Inhibition may be assessed by a decrease in an absolute or relative level of one or more of these variables compared with a control level. The control level may be any type of control level that is utilized in the art, e.g., a pre-dose baseline level, or a level determined from a similar subject, cell, or sample that is untreated or treated with a control (such as, e.g., buffer only control or inactive agent control).

[0606] In some embodiments of the methods of the disclosure, expression of an APP gene is inhibited by at least 20%, 30%, 40%, optionally at least 50%, 60%, 70%, 80%, 85%, 90%, or 95%, or to below the level of detection of the assay. In certain embodiments, the methods include a clinically relevant inhibition of expression of APP, e.g. as demonstrated by a clinically relevant outcome after treatment of a subject with an agent to reduce the expression of APP.

[0607] Inhibition of the expression of an APP gene may be manifested by a reduction of the amount of mRNA expressed by a first cell or group of cells (such cells may be present, for example, in a sample derived from a subject) in which an APP gene is transcribed and which has or have been treated (e.g., by contacting the cell or cells with an RNAi agent of the disclosure, or by administering an RNAi agent of the disclosure to a subject in which the cells are or were present) such that the expression of an APP gene is inhibited, as compared to a second cell or group of cells substantially identical to the first cell or group of cells but which has not or have not been so treated (control cell(s) not treated with an RNAi agent or not treated with an RNAi agent targeted to the gene of interest). The degree of inhibition may be expressed in terms of:

$$\frac{( mRNA in control cells ) - ( mRNA in treated cells )}{( mRNA in control cells )} \cdot 100 \%$$

[0608] In other embodiments, inhibition of the expression of an APP gene may be assessed in terms of a reduction of a parameter that is functionally linked to an APP gene expression, e.g., APP protein expression. APP gene silencing may be determined in any cell expressing APP, either endogenous or heterologous from an expression construct, and by any assay known in the art.

[0609] Inhibition of the expression of an APP protein may be manifested by a reduction in the level of the APP protein that is expressed by a cell or group of cells (e.g., the level of protein expressed in a sample derived from a subject). As explained above, for the assessment of mRNA suppression, the inhibition of protein expression levels in a treated cell or group of cells may similarly be expressed as a percentage of the level of protein in a control cell or group of cells.

[0610] A control cell or group of cells that may be used to assess the inhibition of the expression of an APP gene includes a cell or group of cells that has not yet been contacted with an RNAi agent of the disclosure. For example, the control cell or group of cells may be derived from an individual subject (e.g., a human or animal subject) prior to treatment of the subject with an RNAi agent.

[0611] The level of APP mRNA that is expressed by a cell or group of cells may be determined using any method known in the art for assessing mRNA expression. In one embodiment, the level of expression of APP in a sample is determined by detecting a transcribed polynucleotide, or portion thereof, e.g., mRNA of the APP gene. RNA may be extracted from cells using RNA extraction techniques including, for example, using acid phenol/guanidine isothiocyanate extraction (RNAzol B; Biogenesis), RNeasy™ RNA preparation kits (Qiagen®) or PAXgene (PreAnalytix, Switzerland). Typical assay formats utilizing ribonucleic acid hybridization include nuclear run-on assays, RT-PCR, RNase protection assays, northern blotting, in situ hybridization, and microarray analysis. Circulating APP mRNA may be detected using methods the described in WO2012/177906, the entire contents of which are hereby incorporated herein by reference.

[0612] In some embodiments, the level of expression of APP is determined using a nucleic acid probe. The term “probe”, as used herein, refers to any molecule that is capable of selectively binding to a specific APP nucleic acid or protein, or fragment thereof. Probes can be synthesized by one of skill in the art, or derived from appropriate biological preparations. Probes may be specifically designed to be labeled. Examples of molecules that can be utilized as probes include, but are not limited to, RNA, DNA, proteins, antibodies, and organic molecules.

[0613] Isolated mRNA can be used in hybridization or amplification assays that include, but are not limited to, Southern or northern analyses, polymerase chain reaction (PCR) analyses and probe arrays. One method for the determination of mRNA levels involves contacting the isolated mRNA with a nucleic acid molecule (probe) that can hybridize to APP mRNA. In one embodiment, the mRNA is immobilized on a solid surface and contacted with a probe, for example by running the isolated mRNA on an agarose gel and transferring the mRNA from the gel to a membrane, such as nitrocellulose. In an alternative embodiment, the probe(s) are immobilized on a solid surface and the mRNA is contacted with the probe(s), for example, in an Affymetrix® gene chip array. A skilled artisan can readily adapt known mRNA detection methods for use in determining the level of APP mRNA.

[0614] An alternative method for determining the level of expression of APP in a sample involves the process of nucleic acid amplification or reverse transcriptase (to prepare cDNA) of for example mRNA in the sample, e.g., by RT-PCR (the experimental embodiment set forth in Mullis, 1987, U.S. Pat. No. 4,683,202), ligase chain reaction (Barany (1991) Proc. Natl. Acad. Sci. USA 88: 189-193), self-sustained sequence replication (Guatelli et al. (1990) Proc. Natl. Acad. Sci. USA 87: 1874-1878), transcriptional amplification system (Kwoh et al. (1989) Proc. Natl. Acad. Sci. USA 86: 1173-1177), Q-Beta Replicase (Lizardi et al. (1988) Bio/Technology 6: 1197), rolling circle replication (Lizardi et al., U.S. Pat. No. 5,854,033) or any other nucleic acid amplification method, followed by the detection of the amplified molecules using techniques well known to those of skill in the art. These detection schemes are especially useful for the detection of nucleic acid molecules if such molecules are present in very low numbers. In particular aspects of the disclosure, the level of expression of APP is determined by quantitative fluorogenic RT-PCR (i.e., the TaqMan™ System), by a Dual-Glo® Luciferase assay, or by other art-recognized method for measurement of APP expression or mRNA level.

[0615] The expression level of APP mRNA may be monitored using a membrane blot (such as used in hybridization analysis such as northern, Southern, dot, and the like), or microwells, sample tubes, gels, beads or fibers (or any solid support comprising bound nucleic acids). See U.S. Pat. Nos. 5,770,722, 5,874,219, 5,744,305, 5,677,195 and 5,445,934, which are incorporated herein by reference. The determination of APP expression level may also comprise using nucleic acid probes in solution.

[0616] In some embodiments, the level of mRNA expression is assessed using branched DNA (bDNA) assays or real time PCR (qPCR). The use of this PCR method is described and exemplified in the Examples presented herein. Such methods can also be used for the detection of APP nucleic acids.

[0617] The level of APP protein expression may be determined using any method known in the art for the measurement of protein levels. Such methods include, for example, electrophoresis, capillary electrophoresis, high performance liquid chromatography (HPLC), thin layer chromatography (TLC), hyperdiffusion chromatography, fluid or gel precipitin reactions, absorption spectroscopy, a colorimetric assays, spectrophotometric assays, flow cytometry, immunodiffusion (single or double), immunoelectrophoresis, western blotting, radioimmunoassay (RIA), enzyme-linked immunosorbent assays (ELISAs), immunofluorescent assays, electrochemiluminescence assays, and the like. Such assays can also be used for the detection of proteins indicative of the presence or replication of APP proteins.

[0618] In some embodiments, the efficacy of the methods of the disclosure in the treatment of an APP-related disease is assessed by a decrease in APP mRNA level (e.g, by assessment of a CSF sample for APP level, by brain biopsy, or otherwise).

[0619] In some embodiments, the efficacy of the methods of the disclosure in the treatment of an APP-related disease is assessed by a decrease in APP mRNA level (e.g, by assessment of a liver sample for APP level, by biopsy, or otherwise).

[0620] In some embodiments of the methods of the disclosure, the RNAi agent is administered to a subject such that the RNAi agent is delivered to a specific site within the subject. The inhibition of expression of APP may be assessed using measurements of the level or change in the level of APP mRNA or APP protein in a sample derived from a specific site within the subject, e.g., CNS cells. In certain embodiments, the methods include a clinically relevant inhibition of expression of APP, e.g. as demonstrated by a clinically relevant outcome after treatment of a subject with an agent to reduce the expression of APP.

[0621] As used herein, the terms detecting or determining a level of an analyte are understood to mean performing the steps to determine if a material, e.g., protein, RNA, is present. As used herein, methods of detecting or determining include detection or determination of an analyte level that is below the level of detection for the method used.

### IX. Methods of Treating or Preventing APP-Associated Neurodegenerative Diseases

[0622] The present disclosure also provides methods of using an RNAi agent of the disclosure or a composition containing an RNAi agent of the disclosure to reduce or inhibit APP expression in a cell. The methods include contacting the cell with a dsRNA of the disclosure and maintaining the cell for a time sufficient to obtain degradation of the mRNA transcript of an APP gene, thereby inhibiting expression of the APP gene in the cell. Reduction in gene expression can be assessed by any methods known in the art. For example, a reduction in the expression of APP may be determined by determining the mRNA expression level of APP using methods routine to one of ordinary skill in the art, e.g., northern blotting, qRT-PCR; by determining the protein level of APP using methods routine to one of ordinary skill in the art, such as western blotting, immunological techniques.

[0623] In the methods of the disclosure the cell may be contacted in vitro or in vivo, i.e., the cell may be within a subject.

[0624] A cell suitable for treatment using the methods of the disclosure may be any cell that expresses an APP gene. A cell suitable for use in the methods of the disclosure may be a mammalian cell, e.g., a primate cell (such as a human cell or a non-human primate cell, e.g., a monkey cell or a chimpanzee cell), a non-primate cell (such as a rat cell, or a mouse cell). In one embodiment, the cell is a human cell, e.g., a human CNS cell. In one embodiment, the cell is a human cell, e.g., a human liver cell. In one embodiment, the cell is a human cell, e.g., a human CNS cell and a human liver cell.

[0625] APP expression is inhibited in the cell by at least about 30, 40, 50, 55, 60, 65, 70, 75, 80, 85, 90, 95, 96, 97, 98, 99, or about 100%, i.e., to below the level of detection. In preferred embodiments, APP expression is inhibited by at least 50%.

[0626] The in vivo methods of the disclosure may include administering to a subject a composition containing an RNAi agent, where the RNAi agent includes a nucleotide sequence that is complementary to at least a part of an RNA transcript of the APP gene of the mammal to be treated. When the organism to be treated is a mammal such as a human, the composition can be administered by any means known in the art including, but not limited to oral, intraperitoneal, or parenteral routes, including intracranial (e.g., intraventricular, intraparenchymal, and intrathecal), intravenous, intramuscular, intravitreal, subcutaneous, transdermal, airway (aerosol), nasal, rectal, and topical (including buccal and sublingual) administration. In certain embodiments, the compositions are administered by intravenous infusion or injection. In certain embodiments, the compositions are administered by subcutaneous injection. In certain embodiments, the compositions are administered by intrathecal injection.

[0627] In some embodiments, the administration is via a depot injection. A depot injection may release the RNAi agent in a consistent way over a prolonged time period. Thus, a depot injection may reduce the frequency of dosing needed to obtain a desired effect, e.g., a desired inhibition of APP, or a therapeutic or prophylactic effect. A depot injection may also provide more consistent serum concentrations. Depot injections may include subcutaneous injections or intramuscular injections. In preferred embodiments, the depot injection is a subcutaneous injection.

[0628] In some embodiments, the administration is via a pump. The pump may be an external pump or a surgically implanted pump. In certain embodiments, the pump is a subcutaneously implanted osmotic pump. In other embodiments, the pump is an infusion pump. An infusion pump may be used for intracranial, intravenous, subcutaneous, arterial, or epidural infusions. In preferred embodiments, the infusion pump is a subcutaneous infusion pump. In other embodiments, the pump is a surgically implanted pump that delivers the RNAi agent to the CNS.

[0629] The mode of administration may be chosen based upon whether local or systemic treatment is desired and based upon the area to be treated. The route and site of administration may be chosen to enhance targeting.

[0630] In one aspect, the present disclosure also provides methods for inhibiting the expression of an APP gene in a mammal. The methods include administering to the mammal a composition comprising a dsRNA that targets an APP gene in a cell of the mammal and maintaining the mammal for a time sufficient to obtain degradation of the mRNA transcript of the APP gene, thereby inhibiting expression of the APP gene in the cell. Reduction in gene expression can be assessed by any methods known it the art and by methods, e.g. qRT-PCR, described herein.

[0631] Reduction in protein production can be assessed by any methods known it the art and by methods, e.g. ELISA, described herein. In one embodiment, a CNS biopsy sample or a cerebrospinal fluid (CSF) sample serves as the tissue material for monitoring the reduction in APP gene or protein expression (or of a proxy therefore).

[0632] The present disclosure further provides methods of treatment of a subject in need thereof. The treatment methods of the disclosure include administering an RNAi agent of the disclosure to a subject, e.g., a subject that would benefit from inhibition of APP expression, in a therapeutically effective amount of an RNAi agent targeting an APP gene or a pharmaceutical composition comprising an RNAi agent targeting an APP gene.

[0633] In addition, the present disclosure provides methods of preventing, treating or inhibiting the progression of an APP-associated neurodegenerative disease or disorder characterized by enlarged neuronal cell endosomes, such as Alzheimer's disease (AD) or Down syndrome (DS), particularly examples of such diseases associated with mutations in presenilin 1 (PSEN1).

[0634] The methods include administering to the subject a therapeutically effective amount of any of the RNAi agent, e.g., dsRNA agents, or the pharmaceutical composition provided herein, thereby preventing, treating or inhibiting the progression of the APP-associated neurodegenerative disease or disorder characterized by enlarged neuronal cell endosomes in the subject.

[0635] An RNAi agent of the disclosure may be administered as a “free RNAi agent.” A free RNAi agent is administered in the absence of a pharmaceutical composition. The naked RNAi agent may be in a suitable buffer solution. The buffer solution may comprise acetate, citrate, prolamine, carbonate, or phosphate, or any combination thereof. In one embodiment, the buffer solution is phosphate buffered saline (PBS). The pH and osmolarity of the buffer solution containing the RNAi agent can be adjusted such that it is suitable for administering to a subject.

[0636] Alternatively, an RNAi agent of the disclosure may be administered as a pharmaceutical composition, such as a dsRNA liposomal formulation.

[0637] Subjects that would benefit from a reduction or inhibition of APP gene expression are those having an APP-associated neurodegenerative disease characterized by enlarged neuronal cell endosomes.

[0638] The disclosure further provides methods for the use of an RNAi agent or a pharmaceutical composition thereof, e.g., for treating a subject that would benefit from reduction or inhibition of APP expression, e.g., a subject having an APP-associated neurodegenerative disorder, in combination with other pharmaceuticals or other therapeutic methods, e.g., with known pharmaceuticals or known therapeutic methods, such as, for example, those which are currently employed for treating these disorders. For example, in certain embodiments, an RNAi agent targeting APP is administered in combination with, e.g., an agent useful in treating an APP-associated neurodegenerative disorder as described elsewhere herein or as otherwise known in the art. For example, additional agents and treatments suitable for treating a subject that would benefit from reduction in APP expression, e.g., a subject having an APP-associated neurodegenerative disorder, may include agents currently used to treat symptoms of APP. The RNAi agent and additional therapeutic agents may be administered at the same time or in the same combination, e.g., intrathecally, or the additional therapeutic agent can be administered as part of a separate composition or at separate times or by another method known in the art or described herein.

[0639] Exemplary additional therapeutics and treatments include, for example, sedatives, antidepressants, clonazepam, sodium valproate, opiates, antiepileptic drugs, cholinesterase inhibitors, memantine, benzodiazepines, levodopa, COMT inhibitors (e.g., tolcapone and entacapone), dopamine agonists (e.g., bromocriptine, pergolide, pramipexole, ropinirole, piribedil, cabergoline, apomorphine and lisuride), MAO-B inhibitors (e.g., safinamide, selegiline and rasagiline), amantadine, an anticholinergic, modafinil, pimavanserin, doxepin, rasagline, an antipsychotic, an atypical antipsychotic (e.g., amisulpride, olanzapine, risperidone, and clozapine), riluzole, edaravone, deep brain stimulation, non-invasive ventilation (NIV), invasive ventilation physical therapy, occupational therapy, speech therapy, dietary changes and swallowing technique a feeding tube, a PEG tube, probiotics, and psychological therapy.

[0640] In one embodiment, the method includes administering a composition featured herein such that expression of the target APP gene is decreased, for at least one month. In certain embodiments, expression is decreased for at least 2 months, 3 months, or 6 months.

[0641] Optionally, the RNAi agents useful for the methods and compositions featured herein specifically target RNAs (primary or processed) of the target APP gene. Compositions and methods for inhibiting the expression of these genes using RNAi agents can be prepared and performed as described herein.

[0642] Administration of the dsRNA according to the methods of the disclosure may result in a reduction of the severity, signs, symptoms, or markers of such diseases or disorders in a patient with an APP-associated neurodegenerative disorder. By “reduction” in this context is meant a statistically significant or clinically significant decrease in such level. The reduction can be, for example, at least 5%, 10%, 15%, 20%, 25%, 30%, 35%, 40%, 45%, 50%, 55%, 60%, 65%, 70%, 75%, 80%, 85%, 90%, 95%, or about 100%.

[0643] Efficacy of treatment or prevention of disease can be assessed, for example by measuring disease progression, disease remission, symptom severity, reduction in pain, quality of life, dose of a medication required to sustain a treatment effect, level of a disease marker or any other measurable parameter appropriate for a given disease being treated or targeted for prevention. It is well within the ability of one skilled in the art to monitor efficacy of treatment or prevention by measuring any one of such parameters, or any combination of parameters. For example, efficacy of treatment of an APP-associated neurodegenerative disorder may be assessed, for example, by periodic monitoring of a subject's cognition, learning, or memory. Comparisons of the later readings with the initial readings provide a physician an indication of whether the treatment is effective. It is well within the ability of one skilled in the art to monitor efficacy of treatment or prevention by measuring any one of such parameters, or any combination of parameters. In connection with the administration of an RNAi agent targeting APP or pharmaceutical composition thereof, “effective against” an APP-associated neurodegenerative disorder indicates that administration in a clinically appropriate manner results in a beneficial effect for at least a statistically significant fraction of patients, such as an improvement of symptoms, a cure, a reduction in disease, extension of life, improvement in quality of life, or other effect generally recognized as positive by medical doctors familiar with treating APP-associated neurodegenerative disorders and the related causes.

[0644] A treatment or preventive effect is evident when there is a statistically significant improvement in one or more parameters of disease status, or by a failure to worsen or to develop symptoms where they would otherwise be anticipated. As an example, a favorable change of at least 10% in a measurable parameter of disease, and optionally at least 20%, 30%, 40%, 50% or more can be indicative of effective treatment. Efficacy for a given RNAi agent drug or formulation of that drug can also be judged using an experimental animal model for the given disease as known in the art. When using an experimental animal model, efficacy of treatment is evidenced when a statistically significant reduction in a marker or symptom is observed.

[0645] Alternatively, the efficacy can be measured by a reduction in the severity of disease as determined by one skilled in the art of diagnosis based on a clinically accepted disease severity grading scale. Any positive change resulting in e.g., lessening of severity of disease measured using the appropriate scale, represents adequate treatment using an RNAi agent or RNAi agent formulation as described herein.

[0646] Subjects can be administered a therapeutic amount of dsRNA, such as about 0.01 mg/kg to about 200 mg/kg.

[0647] The RNAi agent can be administered intrathecally, via intravitreal injection, or by intravenous infusion over a period of time, on a regular basis. In certain embodiments, after an initial treatment regimen, the treatments can be administered on a less frequent basis. Administration of the RNAi agent can reduce APP levels, e.g., in a cell, tissue, blood, CSF sample or other compartment of the patient by at least 20%, 30%, 40%, 50%, 55%, 60%, 65%, 70,% 75%, 80%, 85%, 90%, 95%, 96%, 97%, 98%, or at least about 99% or more. In a preferred embodiment, administration of the RNAi agent can reduce APP levels, e.g., in a cell, tissue, blood, CSF sample or other compartment of the patient by at least 50%.

[0648] Before administration of a full dose of the RNAi agent, patients can be administered a smaller dose, such as a 5% infusion reaction, and monitored for adverse effects, such as an allergic reaction. In another example, the patient can be monitored for unwanted immunostimulatory effects, such as increased cytokine (e.g., TNF-alpha or INF-alpha) levels.

[0649] Alternatively, the RNAi agent can be administered subcutaneously, i.e., by subcutaneous injection. One or more injections may be used to deliver the desired, e.g., monthly dose of RNAi agent to a subject. The injections may be repeated over a period of time. The administration may be repeated on a regular basis. In certain embodiments, after an initial treatment regimen, the treatments can be administered on a less frequent basis. A repeat-dose regimen may include administration of a therapeutic amount of RNAi agent on a regular basis, such as monthly or extending to once a quarter, twice per year, once per year. In certain embodiments, the RNAi agent is administered about once per month to about once per quarter (i.e., about once every three months).

[0650] Unless otherwise defined, all technical and scientific terms used herein have the same meaning as commonly understood by one of ordinary skill in the art to which this invention belongs. Although methods and materials similar or equivalent to those described herein can be used in the practice or testing of the RNAi agents and methods featured in the invention, suitable methods and materials are described below. All publications, patent applications, patents, and other references mentioned herein are incorporated by reference in their entirety. In case of conflict, the present specification, including definitions, will control. In addition, the materials, methods, and examples are illustrative only and not intended to be limiting.

[0651] An informal Sequence Listing is also filed herewith and forms part of the specification as filed.

### EXAMPLES

### Example 1: Materials and Methods

### Bioinformatics

[0652] A set of siRNAs targeting the human amyloid precursor protein gene (APP; human NCBI refseqID NM_201414.3; NCBI GeneID: 351; SEQ ID NO: 7) as well as the toxicology-species APP orthologs from cynomolgus monkey were designed using custom R and Python scripts. All the siRNA were designed to have a perfect match to the human APP transcripts and a subset either perfect or near-perfect matches to the cynomolgus monkey ortholog. The human APP NM_201414 REFSEQ mRNA, version 3 (SEQ ID NO: 7), has a length of 3358 bases. The rationale and method for the set of siRNA designs follows. The predicted efficacy for every potential 23mer siRNA from position 10 through the end was determined with a random forest model derived from the direct measure of mRNA knockdown from several thousand distinct siRNA designs targeting a diverse set of vertebrate genes. For each strand of the siRNA, a custom Python script was used in a brute force search to measure the number and positions of mismatches between the siRNA and all potential alignments in the human transcriptome. Extra weight was given to mismatches in the seed region, defined here as positions 2-9 of the antisense oligonucleotide, as well the cleavage site of the siRNA, defined here as positions 10-11 of the antisense oligonucleotide. The relative weight of the mismatches was 2.8, 1.2, 1 for seed mismatches, cleavage site, and other positions up through antisense position 19. Mismatches in the first position were ignored. A specificity score was calculated for each strand by summing the value of each weighted mismatch. Preference was given to siRNAs whose antisense score in human and cynomolgus monkey was >=2 and predicted efficacy was >=50% knockdown.

### In Vitro Screening—Dual-Glo® Luciferase Assay

[0653] Cos-7 cells (ATCC, Manassas, VA) are grown to near confluence at 37° C. in an atmosphere of 5% CO₂ in DMEM (ATCC) supplemented with 10% FBS, before being released from the plate by trypsinization. Multi-dose experiments are performed at 10 nM and 0.1 nM. siRNA and psiCHECK2-APP (NM 201414) plasmid transfections are carried out with a plasmid containing the 3′ untranslated region (UTR). Transfection is carried out by adding 5 μL of siRNA duplexes and 5 μL (5 ng) of psiCHECK2 plasmid per well along with 4.9 μL of Opti-MEM plus 0.1 μL of Lipofectamine 2000 per well (Invitrogen, Carlsbad CA. cat #13778-150) and then incubating at room temperature for 15 minutes. The mixture is then added to the cells which are re-suspended in 35 μL of fresh complete media. The transfected cells are incubated at 37° C. in an atmosphere of 5% CO2.

[0654] Forty-eight hours after the siRNAs and psiCHECK2 plasmid are transfected, Firefly (transfection control) and Renilla (fused to APP target sequence) luciferase are measured. First, media is removed from cells. Then Firefly luciferase activity is measured by adding a mixture of 20 μL Dual-Glo® Luciferase Reagent and 20 μL DMEM to each well. The mixture is incubated at room temperature for 30 minutes before luminescence (500 nm) is measured on a Spectramax (Molecular Devices) to detect the Firefly luciferase signal. Renilla luciferase activity is measured by adding a mixture of 20 μL of room temperature of Dual-Glo® Stop & Glo® Buffer and 0.1 μL Dual-Glo® Stop & Glo® Substrate to each well and the plates are incubated for 10-15 minutes before luminescence is again measured to determine the Renilla luciferase signal. The Dual-Glo® Stop & Glo® mixture quenches the firefly luciferase signal and sustained luminescence for the Renilla luciferase reaction. siRNA activity is determined by normalizing the Renilla (APP) signal to the Firefly (control) signal within each well. The magnitude of siRNA activity is then assessed relative to cells that are transfected with the same vector but are not treated with siRNA or are treated with a non-targeting siRNA. All transfections are done with n=4.

### In Vitro Screening—Cell Culture and Transfections

[0655] Cells are transfected by adding 4.9 μL of Opti-MEM plus 0.1 μL of RNAiMAX per well (Invitrogen, Carlsbad CA. cat #13778-150) to 5 μL of siRNA duplexes per well, with 4 replicates of each siRNA duplex, into a 384-well plate, and incubated at room temperature for 15 minutes. 40 μL of MEDIA containing ˜5×10³ cells are then added to the siRNA mixture. Cells are incubated for 24 hours prior to RNA purification. Experiments are performed at 10 nM and 0.1 nM. Transfection experiments are performed in human hepatoma Hep3B cells (ATCC HB-8064) with EMEM (ATCC catalog no. 30-2003), human neuroblastoma Be(2)-C cells (ATCC CRL-2268) with EMEM:F12 media (Gibco catalog no. 11765054) and mouse neuroblastoma Neuro-2A cells (ATCC CCL-131) with EMEM media.

In Vitro Screening—Total RNA Isolation Using DYNABEADS mRNA Isolation Kit

[0656] RNA is isolated using an automated protocol on a BioTek-EL406 platform using DYNABEADs (Invitrogen, cat #61012). Briefly, 70 μL of Lysis/Binding Buffer and 10 μL of lysis buffer containing 3 μL of magnetic beads are added to the plate with cells. Plates are incubated on an electromagnetic shaker for 10 minutes at room temperature and then magnetic beads are captured and the supernatant is removed. Bead-bound RNA is then washed 2 times with 150 μL Wash Buffer A and once with Wash Buffer B. Beads are then washed with 150 μL Elution Buffer, re-captured and supernatant removed.

In Vitro Screening—cDNA Synthesis Using ABI High Capacity cDNA Reverse Transcription Kit (Applied Biosystems, Foster City, CA, Cat #4368813)

[0657] 12 μL of a master mix containing 1.2 μL 10× Buffer, 0.48 μL 25×dNTPs, 1.2 μL 10× Random primers, 0.6 μL Reverse Transcriptase, 0.6 μL RNase inhibitor and 7.92 μL of H2O per reaction is added to the bead bound RNA isolated above. Plates are sealed, mixed, and incubated on an electromagnetic shaker for 10 minutes at room temperature, followed by 2 h incubation at 37° C.

### In Vitro Screening—Real Time PCR

[0658] 2 μL of cDNA are added to a master mix containing 0.5 μL of human or mouse GAPDH TaqMan Probe (ThermoFisher cat 4352934E or 4351309) and 0.5 μL of appropriate APP probe (e.g., Thermo Fisher Taqman human: Hs00959010, mouse: Mm00436767) and 5 μL Lightcycler 480 probe master mix (Roche Cat #04887301001) per well in a 384 well plates (Roche cat #04887301001). Real time PCR is performed in a LightCycler480 Real Time PCR system (Roche). Each duplex is tested with N=4 and data are normalized to cells transfected with a non-targeting control siRNA. To calculate relative fold change, real time data are analyzed using the ΔΔCt method and normalized to assays performed with cells transfected with a non-targeting control siRNA.

In Vivo Evaluation of APP RNAi Agents in hAPP-IRES-gLuc-Expressing Mice

[0659] Female 6-8 week old C57BL/6 mice are injected intravenously with AAV harboring a Homo sapiens APP (hAPP)-IRES (internal ribosome entry site)-Gaussia luciferase (gLuc) construct. Viral titer is assessed, e.g., targeting approx. 1E+13 VP/mL (viral particles per mL), and total dose is determined (e.g., 2E+11 VP/mouse). 5 mg/kg siRNAs are injected subcutaneously (SC, at DO) two weeks after injection of virus, and serum is sampled at DO and at day 14 (D14), while mice are sacrificed and livers harvested at D14. gLuc assessment and qPCR are performed upon D14 liver samples. A Hs00959010_ml APP Tagman probe is used for qPCR evaluation, while a Mm00436767_ml control probe is also employed.

### APP Endogenous Rodent Pharamacodynamics (PD) Study

[0660] Mouse APP (mAPP) knockdown potency of various siRNA duplexes is evaluated. Animals (C57BL/6 female mice, 20-25 g weight, or Sprague Dawley® rats) are dosed with a single ICV injection (mice) or IT injection (rats) on day 0. On day 14, animals are euthanized. CNS tissue is collected (flash frozen in 15 ml grinding vials with 2 metal balls) for mRNA analysis via RT-qPCR for relative expression of mAPP in treated groups vs a PBS control group. Three mice are dosed per group.

### CVN Mouse Studies

[0661] Male and female CVN mice were bred at CRL Germany and genotyped, housed, dosed and analyzed (IHC, ¹H-MRS and open field test) at CRL Finland, as previously reported, under regular temperature, humidity and light/dark cycle conditions (Wilcock et al. J. Neurosci. 28: 1537-1545; Colton et al. J. Neuropathol. Exp. Neurol. 73: 752-769; Kohonen et al. Nat. Commun. 8: 15932). Homozygous Tg-hAPP^{SwDI}/mNos2^{-/-} (CVN) mice were produced by crossing mice expressing the vasculotropic Swedish K670N/M671L, Dutch E693Q and Iowa D694N human APP mutations under control of the Thy-1 promoter (Davis et al. J. Biol. Chem. 279: 20296-20306) with mNos2^{-/-} (B6 129PNos2 tau1Lau/J) mice (Laubach et al. Am. J. Physiol. 275: H2211-H2218). The study was divided into two phases. In the first phase, 15 CVN mice were dosed by ICV at 3 months of age, with terminal tissue sampling at 6 months of age and 9 months of age. In the second phase, 40 CVN mice and 20 WT mice were divided into three experimental groups, with terminal tissue sampling at 9 months of age and 12 months of age. Metabolic analyses using ¹H-MRS were at 12 months of age, respectively, as previously described (Colton et al. J. Neuropathol. Exp. Neurol. 73: 752-769). Open field test measurements were performed at approximately 9 months of age. Activity chambers (Med Associates, 27×27×20.3 cm) were equipped with infrared beams. Mice were placed in the center of the chamber, and their behaviors were recorded for 30 minutes. The following parameters were recorded and analyzed: distance traveled, number of vertical rearings and average velocity. IHC was performed as described (Wilcock et al. J. Neurosci. 28: 1537-1545; Kan et al. J Neurosci. 35: 5969-5982) using anti-amyloid-beta antibody WO2 (Sigma-Aldrich, MABN10, lot 3557956, 1:500) and anti-IBA1 antibody (Wako Pure Chemicals, 01-1941, lot LEP3218, 1:200). All data are presented as mean±standard deviation or standard error of the mean, and differences were statistically significant at the P<0.05 level. Statistical analyses were performed using the PRISM statistical program (GraphPad Software).

### Mouse Intracerebroventricular (ICV) Infusion

[0662] ICV administration was performed using stereotaxically guided Hamilton syringe and infusion system (Harvard Apparatus). A single 5-μl unilateral injection was performed in the right lateral ventricle at the following coordinates: AP=−0.5 mm (posterior from bregma), ML=+1.0 mm and DV=−1.75 mm, using standard aseptic surgical procedures. After midline skin incision on the scalp, a burr hole was generated at selected coordinates using stereotaxic coordinates and a dental drill. Thereafter, a small puncture in the dura was made at the epicenter of the burr hole, and the needle was lowered to specified depth to reach the lateral ventricle. A Hamilton syringe with a 28-gauge blunt needle was filled with a volume slightly greater than 5 μl. Administration volume of the test articles was at 5 μl and infusion rate at 1 μl min⁻¹ (over 5 minutes). After the infusion, the needle was left in place for a stabilization period of 5 minutes before withdrawal from the ventricle. Withdrawal was performed slowly and paused for 30 seconds when the needle tip was at the cortical area.

### Patient Derived Cell Sources

[0663] PSEN mutation carrier Neural Progenitor cells (NPCs) were obtained from Axol Bioscience (ax0112 (PSEN1 L286V) and ax0114 (PSEN1 A246E)). Healthy control NPCs were obtained from Axol Bioscience (ax0019). APP mutation carrier and isogenic control iPS cells were obtained by CRISPR engineering of the homozygous Swedish mutation into the WTC-11 line with a RAB5-GFP reporter (Allen Cell Institute, #40). Neuron differentiation into a mixed culture of both neurons and astrocytes is described below.

Generation of Human iPSC Derived Neurons and Astrocyte Co-Cultures

[0664] iPSCs were thawed in mTESR Plus basal media (StemCell Technologies, Cat #05826) supplemented with 1×mTESR Plus Supplement (StemCell Technologies, Cat #05827) plus 10 μM Rock inhibitor Y-27632 (Sigma, Cat #Y0503), and seeded in 6 well plates pre-coated with hESCqualified Matrigel (Corning, Cat #354277). Cells were maintained in mTESR Complete media. When iPSCs reached ˜75% confluence, cells were passaged 1:10 into a new Matrigel-coated 6 well plate. On the next day (Day 1), cells were fed by complete media exchange with fresh mTESR Complete media. On Day 2, cells were transduced with 20 μl NGN2 LV plus 0.5 μl Polybrene. On Day 3, cells were fed by complete media exchange with fresh mTESR Complete media. On Day 4-6, NGN2 LV transduced iPSCs were expanded and frozen in mTESR complete media supplemented with 10% DMSO. For differentiation into neural progenitor cells (NPCs), NGN2 LV transduced iPSCs were thawed as described above. On the next day (Day 1), the media was changed to N2B27 media (50:50 Neurobasal [Gibco, Cat #21103-049] and DMEM/F-12 [Gibco, Cat #11320033] base media supplemented with 1×B-27 without vitamin A [Gibco, Cat #12587010], N2 [Gibco, Cat #17502-048], GlutaMAX [Gibco, Cat #35050], Pen/Strep [Gibco, Cat #15140122. On Day 2, cells were switched to N2B27 media supplemented with 1 μg/ml puromycin to select for stably transduced cells. On Day 4, cells were either detached and plated in new Matrigel-coated plates or frozen down in NPC Media supplemented with 10% DMSO. For neuronal differentiation and subsequent experiments, NPCs were plated in Cell Carrier-96 optically clear imaging plates (Perkin Elmer, Cat #6005550) pre-coated with 1× Matrigel at a density of 25,000 cells per well. Cells were maintained in Complete NGN2 Neuron media (N2B27 Media supplemented with 1 μM dbcAMP [Sigma, Cat #D0260], 200 μM Ascorbic Acid [Sigma, Cat #A4403], 10 ng/mL BDNF [Tocris, Cat #2837], and 10 ng/ml GDNF [R&D Systems, Cat #212-GD-050]). Wells were replenished with 50% fresh NGN2 Neuron media daily until DIV 7. At DIV 7, cells were transfected with siRNAs as outlined below following a 50% media change fresh NGN2 Neuron media supplemented with 1× CultureOne Supplement [Gibco, Cat #A3320201]. Cells were treated with BACE inhibitor 4 days prior to take down at DIV 28.

Cell Treatment with siRNA or BACE Inhibitor

[0665] At DIV 7 following neuron differentiation as described above, cells were transfected with siRNA at various concentrations using Lipofectamine RNAiMax [ThermoFisher Scientific Cat #13778100] according to manufacturer's protocol with the following modifications. siRNA and RNAiMax are diluted in Opti-MEM I Reduced Serum Medium [Gibco Cat #31985062] and added to neurons with fresh Neuron media supplemented with 1× Culture One Supplement [Gibco, Cat #A3320201]. BACE inhibitor LY2886721 [AdooQ Bioscience Cat #A10543] was added to the cells 4 days prior to take down at DIV 28.

### Visualization of Early and Late Endosomes

[0666] For live-cell imaging experiments, cells were pre-incubated with the following cell permeant fluorescent dyes added to culture media at least 1 hr prior to visualization: NucBlue Hoechst 33342 [Invitrogen, Cat #R37605, 1:200 dilution] or with the following BacMam reporters to visualize either the early endosomes (Rab5) [Invitrogen, Cat #C10586] or late endosomes (Rab7) [Invitrogen, Cat #C10589] added to culture media at least 16 hrs prior to visualization according to manufacturer recommendations. Cells were imaged at 63× magnification at 37° C. using the Perkin Elmer Opera Phenix high-content confocal imager.

### Example 2: APP-Targeting RNAi Agents Exhibited Little Impact on Morphology of Spheroids in Culture

[0667] Amyloid lowering via administration of 3-Site Amyloid Precursor Protein Cleaving Enzyme (BACE) inhibitors was recently observed to impact calcium fluctuation in rat primary neurons (Satir et al. Alzheimer's Research & Therapy 12: 63). A study design for evaluation of APP-targeting RNAi agents in culture cells is shown in FIG. 1. When spheroids in culture were examined for morphology, no changes from pre-treatment morphology (FIG. 2A) were observed at a 14 day time point (FIG. 2B) after administration of APP-targeting siRNAs/compounds. These results were reinforced by waveform analysis (FIG. 3), in which parameters that described the number, size and shape of spontaneous calcium oscillations in each spheroid were extracted. In total, eight parameters were evaluated: peak count, peak height, peak height standard deviation (SD), peak width, peak spacing, peak spacing standard deviation (SD), peak rise time and peak decay time. All values were normalized to vehicle control in FIG. 3 and plotted as a percentage.

[0668] Minimal modulation of peak count and peak height was observed across treatment groups and concentrations (FIG. 4), regardless of whether an APP-targeting RNAi agent (ΔD454844.47) or the BACE inhibitor LY2886721 was administered. Further analysis of spheroid lysates and supernatants for levels of APP (total), amyloid species (e.g., Aβ38, Aβ40, Aβ42), as well as β-secretase-derived fragment (β-CTF) is also performed.

### Example 3: APP-Targeting RNAi Agents Robustly Reduced Both Soluble APPα (sAPPα) and Soluble APPβ (sAPPβ) Levels in Both Spheroid Cell Media and Intracellularly

[0669] Spheroids in media were assessed for the respective impacts of an APP-targeting siRNA and the BACE inhibitor LY2886721, upon both sAPPα and sAPPβ levels, both in cell media (therefore reflecting secreted levels of sAPPα and sAPPβ) and in cell lysates (to capture intracellular levels of sAPPα and sAPPβ).

[0670] In spheroid cell media, the APP-targeting siRNA exhibited dose-dependent inhibition of sAPPα levels, whereas the BACE inhibitor LY2886721 exhibited no impact on sAPPα levels in cell media (FIG. 5A). When sAPPβ levels were assessed in spheroid cell media, both the APP-targeting siRNA and the BACE inhibitor LY2886721 exhibited dose-dependent inhibition of sAPPβ levels (FIG. 5B). Indeed, the APP-targeting siRNA showed comparable sAPPβ lowering to the BACE inhibitor in cell media. The APP-targeting siRNA was therefore observed to lower both sAPPα and sAPPβ levels in cell media, while the BACE inhibitor LY2886721 was shown to specifically lower sAPPβ levels in cell media.

[0671] In spheroid cell lysates, the APP-targeting siRNA again exhibited dose-dependent inhibition of sAPPα levels, whereas the BACE inhibitor LY2886721 exhibited no impact on sAPPα levels in cell lysates (FIG. 6A). When sAPPβ levels were assessed in spheroid cell lysates, both the APP-targeting siRNA and the BACE inhibitor LY2886721 exhibited dose-dependent inhibition of sAPPβ levels (FIG. 6B). Indeed, the APP-targeting siRNA actually showed superior sAPPβ lowering to the BACE inhibitor in cell lysates. The APP-targeting siRNA was therefore observed to lower both sAPPα and sAPPβ levels in cell lysates, while the BACE inhibitor LY2886721 was shown to specifically lower sAPPβ levels in cell lysates. In addition, lowering of sAPPβ levels in cell lysates appeared to hit a floor following treatment with the BACE inhibitor LY2886721, whereas no such floor was observed for the APP-targeting siRNA.

[0672] FIGS. 5B and 6B above are directly compared in FIG. 7A and FIG. 7B. This direct comparison reinforced that the APP-targeting siRNA showed comparable sAPPβ lowering to BACE inhibitor in cell media. The APP-targeting siRNA lowered both sAPPα and sAPPβ levels in cell lysates, while the BACE inhibitor LY2886721 specifically lowered sAPPβ levels in cell lysates and also hit a floor upon treatment with the BACE inhibitor LY2886721, which indicated that an intracellular reserve of sAPPβ was likely being liberated by the APP-targeting siRNA while not being accessible to the activity of BACE inhibitor LY2886721.

[0673] Notably, Amyloid beta (Aβ) assessments such as those of the current Example carry certain assay sensitivity limitations. For the above-described analysis of spheroid lysates and supernatant, the Aβ peptide panel showed all samples were at or below the lower limit of quantitation (LLOQ) in spheroid lysates. In the media, nearly all samples were LLOQ for A038. When Aβ40 and Aβ42 were assessed, most samples treated with 10 μM-0.3 μM APP-targeting siRNA ΔD454844 and BACE inhibitor LY2886721 were also LLOQ. At the lower doses (0.01-0.1 μM), Aβ40 and Aβ42 were detectable, but near the LLOQ. Samples treated with negative control siRNA exhibited detectable levels of Aβ40 and Aβ42 for all doses.

[0674] In sum, analysis of spheroid lysates and supernatants showed predicted extracellular changes of sAPP. The APP-targeting siRNA ΔD454844 showed superior intracellular sAPPβ lowering as compared to BACE inhibition. An Aβ panel showed LLOQ to near LLOQ for all APP siRNA and BACE inhibitor treatment conditions. No change in cell viability or spheroid quality measures were observed for any treatments. β-secretase-derived fragment ($-CTF) biomarker analysis is also performed.

### Example 4: APP Knockdown Decreased Endosome Size in Mutated PSEN1 Patient-Derived Neurons

[0675] Mutations in APP and PSEN1 have been observed to cause enlargement of Rab5+ endosomes in human induced pluripotent stem cell (iPSC)-derived neurons. (See Kwart et al., Neuron 2019, 104, 256-270.) In particular, Kwart et al. demonstrated that significantly enlarged Rab5+(early) endosomes can be observed in human iPSC-derived neurons (i) homozygous for the APP “Swedish mutation” (KM670/671NL); (ii) homozygous for the APP A692G mutation; (iii) homozygous for the APP V717G mutation; (iv) homozygous for the PSEN1 M146V mutation; (v) homozygous for the PSEN1 L166P mutation; (vi) having PSEN1 A246E/null mutations; and (vii) having double APP/PSEN1 mutations APP knockout has been shown to reduce mean Rab5+ endosome size in neurons, relative to wild-type and neurons harboring the APP A673T mutation.

[0676] The impact of siRNA-mediated APP knockdown upon PSEN1 mutant neuronal cell endosome size was assessed. iPSC-derived neurons were generated from a PSEN1 A246E patient (cells are commercially available from Axol Bioscience Ltd.) and were then administered either a control (anti-luciferase) siRNA or the APP-targeting siRNA AD-454844 (FIG. 8). The significantly elevated Rab5+ endosome sizes observed in cells homozygous for PSEN1 A246E were previously identified. Immunofluorescent Rab5 imaging revealed that treatment of cells homozygous for PSEN1 A246E with the APP-targeting siRNA AD-454844 significantly reduced endosome size (FIGS. 9A and 9B), thereby confirming the association between APP levels and modulation of endosome size, as well as identifying APP as a molecular target for therapeutic treatment of diseases characterized by PSEN1 mutations and enlarged early endosomes. The effects of administering APP-targeting siRNA AD-454844 upon endosome size were further shown to be preferential for early endosomes, as significantly greater reduction of Rab5+(early) endosome size was observed with siRNA AD-454844 treatment, as compared to the more modest size reductions observed in the Rab7-associated endosomal population (an endosomal population that includes both early endosomes and late endosomes/multivesicular bodies (LEs/MVBs)) (FIG. 9B, right-hand panel).

### Example 5: siRNA-Mediated APP Knockdown Reduced Both APP β-CTF Levels and Early Endosome Size in PSEN1 Mutant Patient-Derived Neurons More Effectively than Small Molecule APP-Targeting BACE Inhibitor LY2886721

[0677] The relative efficacies of APP-targeting siRNA AD-454844 and the APP-targeting small molecule BACE inhibitor LY2886721 in reducing early endosomal APP forms and early endosome size in PSEN1^{A246E} patient iPSC-derived cortical neuron model cells were evaluated. Dose-dependent inhibition of sAPPβ levels was observed for both the AD-454844 siRNA and for the BACE inhibitor LY2886721, though AD-454844 exhibited enhanced potency of sAPPβ knockdown across all concentrations assessed (FIG. 10, left-hand panel). In contrast, dose-dependent inhibition of sAPPα levels was only observed for AD-454844 siRNA, whereas BACE inhibitor LY2886721 exhibited no sAPPα knockdown at any dose tested (FIG. 10, second panel from left). While dose-dependent reduction of APP β-C-terminal fragment (β-CTF) levels was again observed for both AD-454844 siRNA and small molecule BACE inhibitor LY2886721, significantly more potent reduction of β-CTF was observed for AD-454844 siRNA, as compared to LY2886721 (FIG. 10, third panel from left). Meanwhile, early endosome (RAB5+ endosome) size was significantly more reduced in PSEN1 A246E patient iPSC-derived cortical neuron model cells treated with AD-454844 siRNA at 10 nM (approx. 40-50% reduction in early endosome size), as compared to the more modest levels of early endosome size reduction observed for such cells treated with LY2886721 at 10 nM (approx. 20% reduction in early endosome size) (FIG. 10, right-hand panel). It was therefore demonstrated that APP-targeting siRNAs are capable of exerting a preferential reduction of APP forms found in early endosomes and upon early endosome size, with a molecular profile and magnitude of effect that was clearly different from that observed for the APP-targeting small molecule BACE inhibitor LY2886721, and which is also distinct from antibody-based therapies (as antibody-based therapeutics do not target intracellular β-CTF).

### Example 6: Preclinical Efficacy of C16-siRNA in a Mouse Model of Alzheimer's Disease

[0678] A Tg-hAPP^{SwDI}/mNos2^{-/-} (CVN) transgenic mouse expressing human APP harboring the Swedish K670N/M671L, Dutch E693Q and Iowa D694N mutations was crossed to a Nos2^{-/-} background (Wilcock et al. J. Neurosci. 28, 1537-1545), which accumulates Aβ in the brain parenchyma and vasculature (Colton et al. J. Neuropathol. Exp. Neurol. 73, 752-769), to evaluate preclinical efficacy of C16-siRNAs. Using an APP targeting C16-siRNA (AD-454972), a single 60 μg ICV administration was demonstrated to reduce APP mRNA and sAPPα protein levels by 50% in the ventral cortex (VC) and CSF (FIG. 11A). A higher, 120 μg dose exhibited an approximate 75% reduction of APP mRNA at 30 days and >50% reduction at 60 days, finally normalizing at 90 days in the VC (FIGS. 11B and 11D). When dosed at 3 months of age (FIG. 11C), hippocampal APP mRNA and CSF sAPPα protein levels remained reduced at approximately 40-50% after 90 days (FIG. 11D). It was further examined whether knockdown of APP was sufficient to reduce pathology in the CVN mice, and the study was accordingly divided into two categories: the first group, was dosed pre-symptomatically, and was assessed for Aβ40 (AB40) deposits as well as inflammation; the second group was dosed post-symptomatically, and was evaluated for changes in metabolites as well as behavior (FIG. 11C). Knockdown of APP lasted for 3 months in the VC (FIG. 11B); however, AB40 deposits were reduced by approximately 50% even after 6 months (FIGS. 11E and 11F), albeit not significantly due to the small sample size (n=2-4). In this model, ionized calcium-binding adaptor molecule 1 (Iba1) was upregulated at 4 months and continued to elevate at 9 months, concomitant with increases in inflammation when neurodegeneration occurred (Kan et al. J Neurosci. 35: 5969-5982). The AD-454972 siRNA-treated group showed a significantly slower rate of increase in IBA1 IHC (immunohistochemistry) intensity in the cortex and hippocampus (FIG. 11G). In addition, the expression of Iba1 mRNA was reduced by 20-30% in AD-454972 siRNA-treated animals after 6 months (FIG. 11G). To determine whether decreases in Aβ deposition and inflammation could be associated with restoration of neuronal function, proton magnetic resonance spectroscopy (Hall et al. Curr. Top. Behav. Neurosci. 11: 169-198; ¹H-MRS) was used to measure metabolites, such as glutamate (Glu) and N-acetylaspartate (NAA). These metabolites have been found to be reduced in patients with Alzheimer's disease, are reflective of neuronal integrity and are predictors of cognitive deficits (Su et al. Transl. Psychiatry 6: e877; Wang et al. J. Alzheimers Dis. 46: 1049-1070). Here, a significant reduction in both Glu and NAA levels was observed in the CVN mice at 12 months of age, as compared with wild-type (WT) (FIG. 11H). Knockdown of APP in the CVN mice normalized Glu levels to that of the WT; however, it had little effect on NAA levels (FIG. 11H). In the open field test, the CVN mice were observed to exhibit a measurable increase in total distance traveled and an increase in rearing frequency (FIG. 11I). Treatment with the APP-targeting AD-454972 siRNA normalized both measures to levels seen in the WT (FIG. 11I). Velocity measures in all groups were not significantly different from each other (FIG. 11I). Accordingly, C16-siRNAs (particularly the AD-454972 siRNA) exhibited preclinical efficacy in a mouse model of AD.

### Example 7: Preclinical Efficacy of C16-siRNA in Human iPSC-Derived Neural Stem Cells

[0679] The efficacy of administration of C16-siRNAs of the instant disclosure in decreasing endosome size and/or having therapeutic impact upon a treated subject is assessed in the following iPSC-derived neural stem cells: ax0112 fibroblasts (38 year old female; AD patient PSEN1 L286V) and ax0114 fibroblasts (31 year old female; AD patient PSEN1 A246E). Endosome size is expected to decrease in C16-siRNA-treated subjects, as compared to appropriate control(s). The “mRNA” sequences of the Informal Sequence Listing and certain of the “mRNA target” sequences listed herein may be noted as reciting thymine (T) residues rather than uracil (U) residues. As is apparent to one of ordinary skill in the art, such sequences reciting “T” residues rather than “U” residues can be derived from NCBI accession records that list, as “mRNA” sequences, the DNA sequences (not RNA sequences) that directly correspond to mRNA sequences. Such DNA sequences that directly correspond to mRNA sequences technically constitute the DNA sequence that is the complement of the cDNA (complementary DNA) sequence for an indicated mRNA. Thus, while the mRNA target sequence does, in fact, actually include uracil (U) rather than thymine (T), the NCBI record-derived “mRNA” sequence includes thymine (T) residues rather than uracil (U) residues.

TABLE 1
Abbreviations of nucleotide monomers used in nucleic acid sequence representation
It will be understood that these monomers, when present in an oligonucleotide, are mutually linked
by 5′-3′-phosphodiester bonds. The abbreviations of below Table 1 are understood to omit the 3′-
phosphate (i.e. they are 3′-OH) when placed at the 3′-terminal position of an oligonucleotide of
the instant disclosure.

| Abbreviation | Nucleotide(s) |
|---|---|
| A | Adenosine-3′-phosphate |
| Ab | beta-L-adenosine-3′-phosphate |
| Abs | beta-L-adenosine-3′-phosphorothioate |
| Af | 2′-fluoroadenosine-3′-phosphate |
| Afs | 2′-fluoroadenosine-3′-phosphorothioate |
| As | adenosine-3′-phosphorothioate |
| C | cytidine-3′-phosphate |
| Cb | beta-L-cytidine-3′-phosphate |
| Cbs | beta-L-cytidine-3′-phosphorothioate |
| Cf | 2′-fluorocytidine-3′-phosphate |
| Cfs | 2′-fluorocytidine-3′-phosphorothioate |
| Cs | cytidine-3′-phosphorothioate |
| G | guanosine-3′-phosphate |
| Gb | beta-L-guanosine-3′-phosphate |
| Gbs | beta-L-guanosine-3′-phosphorothioate |
| Gf | 2′-fluoroguanosine-3′-phosphate |
| Gfs | 2′-fluoroguanosine-3′-phosphorothioate |
| Gs | guanosine-3′-phosphorothioate |
| T | 5′-methyluridine-3′-phosphate |
| Tf | 2′-fluoro-5-methyluridine-3′-phosphate |
| Tfs | 2′-fluoro-5-methyluridine-3′-phosphorothioate |
| Ts | 5-methyluridine-3′-phosphorothioate |
| U | Uridine-3′-phosphate |
| Uf | 2′-fluorouridine-3′-phosphate |
| Ufs | 2′-fluorouridine-3′-phosphorothioate |
| Us | uridine-3′-phosphorothioate |
| N | any nucleotide, modified or unmodified |
| a | 2′-O-methyladenosine-3′-phosphate |
| as | 2′-O-methyladenosine-3′-phosphorothioate |
| c | 2′-O-methylcytidine-3′-phosphate |
| cs | 2′-O-methylcytidine-3′-phosphorothioate |
| g | 2′-O-methylguanosine-3′-phosphate |
| gs | 2′-O-methylguanosine-3′-phosphorothioate |
| t | 2′-O-methyl-5-methyluridine-3′-phosphate |
| ts | 2′-O-methyl-5-methyluridine-3′-phosphorothioate |
| u | 2′-O-methyluridine-3′-phosphate |
| us | 2′-O-methyluridine-3′-phosphorothioate |
| s | phosphorothioate linkage |
| L96 | N-[tris(GalNAc-alkyl)-amidodecanoyl)]-4-hydroxyprolinol Hyp-(GalNAc- |
| | alkyl)3 (Hyp-(GalNAc-alkyl)3) |
| | OR |
| | (2S,4R)-1-[29-[[2-(acetylamino)-2-deoxy-ß-D-galactopyranosyl]oxy]-14,14- |
| | bis[[3-[[3-[[5-[[2-(acetylamino)-2-deoxy-ß-D-galactopyranosyl]oxy]-1- |
| | oxopentyl]amino]propyl]amino]-3-oxopropoxy]methyl]-1,12,19,25-tetraoxo-16- |
| | oxa-13,20,24-triazanonacos-1-yl]-4-hydroxy-2-hydroxymethylpyrrolidine |
| | [chemical structure] |
| uL96 | 2′-O-methyluridine-3′-phosphate ((2S,4R)-1-[29-[[2-(acetylamino)-2-deoxy-ß- |
| | D-galactopyranosyl]oxy]-14,14-bis[[3-[[3-[[5-[[2-(acetylamino)-2-deoxy-ß-D- |
| | galactopyranosyl]oxy]-1-oxopentyl]amino]propyl]amino]-3- |
| | oxopropoxy]methyl]-1,12,19,25-tetraoxo-16-oxa-13,20,24-triazanonacos-1-yl]- |
| | 4-hydroxy-2-pyrrolidinyl)methyl ester |
| | [chemical structure] |
| aL96 | 2′-O-methyladenosine-3′-phosphate ((2S,4R)-1-[29-[2-(acetylamino)-2-deoxy- |
| | ß-D-galactopyranosyl]oxy]-14,14-bis[[3-[[3-[[5-[[2-(acetylamino)-2-deoxy-ß-D- |
| | galactopyranosyl]oxy]-1-oxopentyl]amino]propyl]amino]-3- |
| | oxopropoxy]methyl]-1,12,19,25-tetraoxo-16-oxa-13,20,24-triazanonacos-1-yl]- |
| | 4-hydroxy-2-pyrrolidinyl)methyl ester |
| cL96 | 2′-O-methylcytidine-3′-phosphate ((2S,4R)-1-[29-[[2-(acetylamino)-2-deoxy-ß- |
| | D-galactopyranosyl]oxy]-14,14-bis[[3-[[3-[[5-[[2-(acetylamino)-2-deoxy-ß-D- |
| | galactopyranosyl]oxy]-1-oxopentyl]amino]propyl]amino]-3- |
| | oxopropoxy]methyl]-1,12,19,25-tetraoxo-16-oxa-13,20,24-triazanonacos-1-yl]- |
| | 4-hydroxy-2-pyrrolidinyl)methyl ester |
| gL96 | 2′-O-methylguanosine-3′-phosphate ((2S,4R)-1-[29-[[2-(acetylamino)-2-deoxy- |
| | ß-D-galactopyranosyl]oxy]-14,14-bis[[3-[[3-[[5-[[2-(acetylamino)-2-deoxy-ß-D- |
| | galactopyranosyl]oxy]-1-oxopentyl]amino]propyl]amino]-3- |
| | oxopropoxy]methyl]-1,12,19,25-tetraoxo-16-oxa-13,20,24-triazanonacos-1-yl]- |
| | 4-hydroxy-2-pyrrolidinyl)methyl ester |
| Y34 | 2-hydroxymethyl-tetrahydrofurane-4-methoxy-3-phosphate (abasic 2′-OMe |
| | furanose) |
| Y44 | inverted abasic DNA (2-hydroxymethyl-tetrahydrofurane-5-phosphate) |
| (Agn) | Adenosine-glycol nucleic acid (GNA) |
| (Cgn) | Cytidine-glycol nucleic acid (GNA) |
| (Ggn) | Guanosine-glycol nucleic acid (GNA) |
| (Tgn) | Thymidine-glycol nucleic acid (GNA) S-Isomer |
| P | Phosphate |
| VP | Vinyl-phosphate |
| (Aam) | 2′-O-(N-methylacetamide)adenosine-3′-phosphate |
| (Aams) | 2′-O-(N-methylacetamide)adenosine-3′-phosphorothioate |
| (Gam) | 2′-O-(N-methylacetamide)guanosine-3′-phosphate |
| (Gams) | 2′-O-(N-methylacetamide)guanosine-3′-phosphorothioate |
| (Tam) | 2′-O-(N-methylacetamide)thymidine-3′-phosphate |
| (Tams) | 2′-O-(N-methylacetamide)thymidine-3′-phosphorothioate |
| dA | 2′-deoxyadenosine-3′-phosphate |
| dAs | 2′-deoxyadenosine-3′-phosphorothioate |
| dC | 2′-deoxycytidine-3′-phosphate |
| dCs | 2′-deoxycytidine-3′-phosphorothioate |
| dG | 2′-deoxyguanosine-3′-phosphate |
| dGs | 2′-deoxyguanosine-3′-phosphorothioate |
| dT | 2′-deoxythymidine-3′-phosphate |
| dTs | 2′-deoxythymidine-3′-phosphorothioate |
| dU | 2′-deoxyuridine |
| dUs | 2′-deoxyuridine-3-phosphorothioate |
| (Aeo) | 2′-O-methoxyethyladenosine-3′-phosphate |
| (Aeos) | 2′-O-methoxyethyladenosine-3′-phosphorothioate |
| (Geo) | 2′-O-methoxyethylguanosine-3′-phosphate |
| (Geos) | 2′-O-methoxyethylguanosine-3′-phosphorothioate |
| (Teo) | 2′-O-methoxyethyl-5-methyluridine-3′-phosphate |
| (Teos) | 2′-O-methoxyethyl-5-methyluridine-3′-phosphorothioate |
| (m5Ceo) | 2′-O-methoxyethyl-5-methylcytidine-3′-phosphate |
| (m5Ceos) | 2′-O-methoxyethyl-5-methylcytidine-3′-phosphorothioate |
| (A3m) | 3′-O-methyladenosine-2′-phosphate |
| (A3mx) | 3′-O-methyl-xylofuranosyladenosine-2′-phosphate |
| (G3m) | 3′-O-methylguanosine-2′-phosphate |
| (G3mx) | 3′-O-methyl-xylofuranosylguanosine-2′-phosphate |
| (C3m) | 3′-O-methylcytidine-2′-phosphate |
| (C3mx) | 3′-O-methyl-xylofuranosylcytidine-2′-phosphate |
| (U3m) | 3′-O-methyluridine-2′-phosphate |
| U3mx) | 3′-O-methyl-xylofuranosyluridine-2′-phosphate |
| (m5Cam) | 2′-O-(N-methylacetamide)-5-methylcytidine-3′-phosphate |
| (m5Cams) | 2′-O-(N-methylacetamide)-5-methylcytidine-3′-phosphorothioate |
| (Ahd) | 2′-O-hexadecyl-adenosine-3′-phosphate |
| (Ahds) | 2′-O-hexadecyl-adenosine-3′-phosphorothioate |
| (Ghd) | 2′-O-hexadecyl-guanosine-3′-phosphate |
| (Ghds) | 2′-O-hexadecyl-guanosine-3′-phosphorothioate |
| (Chd) | 2′-O-hexadecyl-cytidine-3′-phosphate |
| (Chds) | 2′-O-hexadecyl-cytidine-3′-phosphorothioate |
| (Uhd) | 2′-O-hexadecyl-uridine-3′-phosphate |
| (Uhds) | 2′-O-hexadecyl-uridine-3′-phosphorothioate |
| (pshe) | Hydroxyethylphosphorothioate |
| Q363 | N-(hexadecanoyl)-(S)-pyrrolidin-3-ol-phosphate |
| | [chemical structure] |
| (A2p) | adenosine-2′-phosphate |
| (C2p) | cytidine-2′-phosphate |
| (G2p) | guanosine-2′-phosphate |
| (U2p) | uridine-2′-phosphate |
| (A2ps) | adenosine-2′-phosphorothioate |
| (C2ps) | cytidine-2′-phosphorothioate |
| (G2ps) | guanosine-2′-phosphorothioate |
| (U2ps) | uridine-2′-phosphorothioate |

[0680] Exemplary APP-targeting iRNA agents expressly contemplated for use in the methods and compositions of the instant disclosure are presented in Tables 2-21 below.

TABLE 2
Exemplary Human APP-Targeting RNAi Agent Duplexes, Modified Sequences

| | | SEQ | Antisense | SEQ | | SEQ |
|---|---|---|---|---|---|---|
| Duplex | Sense Sequence | ID | Sequence | ID | mRNA target | ID |
| Name | (5′ to 3′) | NO | (5′ to 3′) | NO | sequence | NO |
| AD- | gsasccc(Ahd)Afu | 65 | asAfsagua(Ggn)g | 339 | GUGACCCAAUUAAGU | 613 |
| 392699 | UfAfAfguccuacuu | | acuuaAfuUfggguc | | CCUACUUU | |
| | uL96 | | sasc | | | |
| AD- | uscsucc(Uhd)Gfa | 66 | asUfsguga(Tgn)a | 340 | UCUCUCCUGAUUAUU | 614 |
| 392700 | UfUfAfuuuaucaca | | aauaaUfcAfggaga | | UAUCACAU | |
| | uL96 | | sgsa | | | |
| AD- | cscsuga(Ahd)Cfu | 67 | asUfsggau(Tgn)a | 341 | UGCCUGAACUUGAAU | 615 |
| 392703 | UfGfAfauuaaucca | | auucaAfgUfucagg | | UAAUCCAC | |
| | uL96 | | scsa | | | |
| AD- | gsgsuuc(Ahd)Afa | 68 | asAfsuugc(Agn)c | 342 | UGGGUUCAAACAAAG | 616 |
| 392704 | CfAfAfaggugcaau | | cuuugUfuUfgaacc | | GUGCAAUC | |
| | uL96 | | scsa | | | |
| AD- | ususuac(Uhd)Cfa | 69 | csAfsaaag(Ggn)c | 343 | GAUUUACUCAUUAUC | 617 |
| 392705 | UfUfAfucgccuuuu | | gauaaUfgAfguaaa | | GCCUUUUG | |
| | gL96 | | susc | | | |
| AD- | asusuua(Ghd)Cfu | 70 | asCfsuagu(Tgn)u | 344 | GAAUUUAGCUGUAUC | 618 |
| 392707 | GfUfAfucaaacuag | | gauacAfgCfuaaau | | AAACUAGU | |
| | uL96 | | susc | | | |
| AD- | asgsuau(Uhd)Cfc | 71 | asGfsugau(Cgn)a | 345 | UAAGUAUUCCUUUCC | 619 |
| 392708 | UfUfUfccugaucac | | ggaaaGfgAfauacu | | UGAUCACU | |
| | uL96 | | susa | | | |
| AD- | gscsuua(Uhd)Gfa | 72 | gsAfsaagc(Ggn)a | 346 | UUGCUUAUGACAUGA | 620 |
| 392709 | CfAfUfgaucgcuuu | | ucaugUfcAfuaagc | | UCGCUUUC | |
| | cL96 | | sasa | | | |
| AD- | asasgau(Ghd)Ufg | 73 | usAfscaaa(Tgn)u | 347 | UUAAGAUGUGUCUUC | 621 |
| 392710 | UfCfUfucaauuugu | | gaagaCfaCfaucuu | | AAUUUGUA | |
| | aL96 | | sasa | | | |
| AD- | gscsaaa(Ahd)Cfc | 74 | asUfsagug(Agn)a | 348 | CAGCAAAACCAUUGC | 622 |
| 392711 | AfUfUfgcuucacua | | gcaauGfgUfuuugc | | UUCACUAC | |
| | uL96 | | susg | | | |
| AD- | asusuua(Chd)Ufc | 75 | asAfsaagg(Cgn)g | 349 | UGAUUUACUCAUUAU | 623 |
| 392712 | AfUfUfaucgccuuu | | auaauGfaGfuaaau | | CGCCUUUU | |
| | uL96 | | scsa | | | |
| AD- | usascuc(Ahd)Ufu | 76 | asUfscaaa(Agn)g | 350 | UUUACUCAUUAUCGC | 624 |
| 392713 | AfUfCfgccuuuuga | | gcgauAfaUfgagua | | CUUUUGAC | |
| | uL96 | | sasa | | | |
| AD- | usgsccu(Ghd)Afa | 77 | asGfsauua(Agn)u | 351 | GAUGCCUGAACUUGA | 625 |
| 392714 | CfUfUfgaauuaauc | | ucaagUfuCfaggca | | AUUAAUCC | |
| | uL96 | | susc | | | |
| AD- | csusgaa(Chd)Ufu | 78 | usGfsugga(Tgn)u | 352 | GCCUGAACUUGAAUU | 626 |
| 392715 | GfAfAfuuaauccac | | aauucAfaGfuucag | | AAUCCACA | |
| | aL96 | | sgsc | | | |
| AD- | ususuag(Chd)Ufg | 79 | asAfscuag(Tgn)u | 353 | AAUUUAGCUGUAUCA | 627 |
| 392716 | UfAfUfcaaacuagu | | ugauaCfaGfcuaaa | | AACUAGUG | |
| | uL96 | | susu | | | |
| AD- | gsasaua(Ghd)Afu | 80 | usAfsauca(Ggn)g | 354 | AUGAAUAGAUUCUCU | 628 |
| 392717 | UfCfUfcuccugauu | | agagaAfuCfuauuc | | CCUGAUUA | |
| | aL96 | | sasu | | | |
| AD- | uscscug(Ahd)Ufu | 81 | asUfsaugu(Ggn)a | 355 | UCUCCUGAUUAUUUA | 629 |
| 392718 | AfUfUfuaucacaua | | uaaauAfaUfcagga | | UCACAUAG | |
| | uL96 | | sgsa | | | |
| AD- | cscscaa(Uhd)Ufa | 82 | asUfsaaag(Tgn)a | 356 | GACCCAAUUAAGUCC | 630 |
| 392719 | AfGfUfccuacuuua | | ggacuUfaAfuuggg | | UACUUUAC | |
| | uL96 | | susc | | | |
| AD- | csasuau(Ghd)Cfu | 83 | asAfsucga(Tgn)u | 357 | UACAUAUGCUUUAAG | 631 |
| 392720 | UfUfAfagaaucgau | | cuuaaAfgCfauaug | | AAUCGAUG | |
| | uL96 | | susa | | | |
| AD- | csusucu(Chd)Ufu | 84 | asGfsaaua(Cgn)u | 358 | UGCUUCUCUUGCCUA | 632 |
| 392721 | GfCfCfuaaguauuc | | uaggcAfaGfagaag | | AGUAUUCC | |
| | uL96 | | scsa | | | |
| AD- | csasuug(Chd)Ufu | 85 | asCfsgauc(Agn)u | 359 | AUCAUUGCUUAUGAC | 633 |
| 392722 | AfUfGfacaugaucg | | gucauAfaGfcaaug | | AUGAUCGC | |
| | uL96 | | sasu | | | |
| AD- | csusuau(Ghd)Afc | 86 | asGfsaaag(Cgn)g | 360 | UGCUUAUGACAUGAU | 634 |
| 392723 | AfUfGfaucgcuuuc | | aucauGfuCfauaag | | CGCUUUCU | |
| | uL96 | | scsa | | | |
| AD- | usasuga(Chd)Afu | 87 | asUfsagaa(Agn)g | 361 | CUUAUGACAUGAUCG | 635 |
| 392724 | GfAfUfcgcuuucua | | cgaucAfuGfucaua | | CUUUCUAC | |
| | uL96 | | sasg | | | |
| AD- | usgsaca(Uhd)Gfa | 88 | asUfsguag(Agn)a | 362 | UAUGACAUGAUCGCU | 636 |
| 392725 | UfCfGfcuuucuaca | | agcgaUfcAfuguca | | UUCUACAC | |
| | uL96 | | susa | | | |
| AD- | gsasucg(Chd)Ufu | 89 | asAfsuaca(Ggn)u | 363 | AUGAUCGCUUUCUAC | 637 |
| 392726 | UfCfUfacacuguau | | guagaAfaGfcgauc | | ACUGUAUU | |
| | uL96 | | sasu | | | |
| AD- | asasaac(Uhd)Afu | 90 | asGfsacgu(Cgn)a | 364 | GCAAAACUAUUCAGA | 638 |
| 392727 | UfCfAfgaugacguc | | ucugaAfuAfguuuu | | UGACGUCU | |
| | uL96 | | sgsc | | | |
| AD- | asasacu(Ahd)Ufu | 91 | asAfsgacg(Tgn)c | 365 | CAAAACUAUUCAGAU | 639 |
| 392728 | CfAfGfaugacgucu | | aucugAfaUfaguuu | | GACGUCUU | |
| | uL96 | | susg | | | |
| AD- | ascsgaa(Ahd)Afu | 92 | asCfsuugu(Agn)g | 366 | CUACGAAAAUCCAAC | 640 |
| 392729 | CfCfAfaccuacaag | | guuggAfuUfuucgu | | CUACAAGU | |
| | uL96 | | sasg | | | |
| AD- | usgscuu(Chd)Ufc | 93 | asAfsuacu(Tgn)a | 367 | GCUGCUUCUCUUGCC | 641 |
| 392730 | UfUfGfccuaaguau | | ggcaaGfaGfaagca | | UAAGUAUU | |
| | uL96 | | sgsc | | | |
| AD- | usgscuu(Ahd)Ufg | 94 | asAfsagcg(Agn)u | 368 | AUUGCUUAUGACAUG | 642 |
| 392731 | AfCfAfugaucgcuu | | cauguCfaUfaagca | | AUCGCUUU | |
| | uL96 | | sasu | | | |
| AD- | usgsauc(Ghd)Cfu | 95 | asUfsacag(Tgn)g | 369 | CAUGAUCGCUUUCUA | 643 |
| 392732 | UfUfCfuacacugua | | uagaaAfgCfgauca | | CACUGUAU | |
| | uL96 | | susg | | | |
| AD- | asuscgc(Uhd)Ufu | 96 | usAfsauac(Agn)g | 370 | UGAUCGCUUUCUACA | 644 |
| 392733 | CfUfAfcacuguauu | | uguagAfaAfgcgau | | CUGUAUUA | |
| | aL96 | | scsa | | | |
| AD- | uscsuuu(Ghd)Afc | 97 | asGfsuuuu(Cgn)g | 371 | CAUCUUUGACCGAAA | 645 |
| 392734 | CfGfAfaacgaaaac | | uuucgGfuCfaaaga | | CGAAAACC | |
| | uL96 | | susg | | | |
| AD- | gsusucu(Ghd)Gfg | 98 | usGfsauau(Tgn)u | 372 | AGGUUCUGGGUUGAC | 646 |
| 392735 | UfUfGfacaaauauc | | gucaaCfcCfagaac | | AAAUAUCA | |
| | aL96 | | scsu | | | |
| AD- | usgsggu(Uhd)Gfa | 99 | asUfscuug(Agn)u | 373 | UCUGGGUUGACAAAU | 647 |
| 392736 | CfAfAfauaucaaga | | auuugUfcAfaccca | | AUCAAGAC | |
| | uL96 | | sgsa | | | |
| AD- | gsasuuu(Ahd)Cfu | 100 | asAfsaggc(Ggn)a | 374 | AUGAUUUACUCAUUA | 648 |
| 392737 | CfAfUfuaucgccuu | | uaaugAfgUfaaauc | | UCGCCUUU | |
| | uL96 | | sasu | | | |
| AD- | uscscuu(Uhd)Cfc | 101 | usGfscaua(Ggn)u | 375 | AUUCCUUUCCUGAUC | 649 |
| 392738 | UfGfAfucacuaugc | | gaucaGfgAfaagga | | ACUAUGCA | |
| | aL96 | | sasu | | | |
| AD- | csusuuc(Chd)Ufg | 102 | asAfsugca(Tgn)a | 376 | UCCUUUCCUGAUCAC | 650 |
| 392739 | AfUfCfacuaugcau | | gugauCfaGfgaaag | | UAUGCAUU | |
| | uL96 | | sgsa | | | |
| AD- | asusugc(Uhd)Ufa | 103 | asGfscgau(Cgn)a | 377 | UCAUUGCUUAUGACA | 651 |
| 392740 | UfGfAfcaugaucgc | | ugucaUfaAfgcaau | | UGAUCGCU | |
| | uL96 | | sgsa | | | |
| AD- | uscsuuu(Ahd)Afc | 104 | asAfsacuu(Cgn)a | 378 | UUUCUUUAACCAGUC | 652 |
| 392741 | CfAfGfucugaaguu | | gacugGfuUfaaaga | | UGAAGUUU | |
| | uL96 | | sasa | | | |
| AD- | gsgsauc(Ahd)Gfu | 105 | asAfsucgu(Tgn)u | 379 | AAGGAUCAGUUACGG | 653 |
| 392742 | UfAfCfggaaacgau | | ccguaAfcUfgaucc | | AAACGAUG | |
| | uL96 | | susu | | | |
| AD- | csusggg(Uhd)Ufg | 106 | usCfsuuga(Tgn)a | 380 | UUCUGGGUUGACAAA | 654 |
| 392743 | AfCfAfaauaucaag | | uuuguCfaAfcccag | | UAUCAAGA | |
| | aL96 | | sasa | | | |
| AD- | asusgau(Uhd)Ufa | 107 | asGfsgcga(Tgn)a | 381 | UUAUGAUUUACUCAU | 655 |
| 392744 | CfUfCfauuaucgcc | | augagUfaAfaucau | | UAUCGCCU | |
| | uL96 | | sasa | | | |
| AD- | csusugu(Ghd)Gfu | 108 | asAfsuugg(Ggn)u | 382 | UUCUUGUGGUUUGUG | 656 |
| 392745 | UfUfGfugacccaau | | cacaaAfcCfacaag | | ACCCAAUU | |
| | uL96 | | sasa | | | |
| AD- | asusaug(Chd)Ufu | 109 | asCfsaucg(Agn)u | 383 | ACAUAUGCUUUAAGA | 657 |
| 392746 | UfAfAfgaaucgaug | | ucuuaAfaGfcauau | | AUCGAUGG | |
| | uL96 | | sgsu | | | |
| AD- | ususugu(Chd)Cfa | 110 | asCfsccaa(Agn)g | 384 | UUUUUGUCCACGUAU | 658 |
| 392747 | CfGfUfaucuuuggg | | auacgUfgGfacaaa | | CUUUGGGU | |
| | uL96 | | sasa | | | |
| AD- | uscsauu(Ghd)Ufa | 111 | asCfsguaa(Agn)a | 385 | GUUCAUUGUAAGCAC | 659 |
| 392748 | AfGfCfacuuuuacg | | gugcuUfaCfaauga | | UUUUACGG | |
| | uL96 | | sasc | | | |
| AD- | gsgscca(Ahd)Cfa | 112 | asGfsuuca(Cgn)u | 386 | UUGGCCAACAUGAUU | 660 |
| 392749 | UfGfAfuuagugaac | | aaucaUfgUfuggcc | | AGUGAACC | |
| | uL96 | | sasa | | | |
| AD- | gsasuca(Ghd)Ufu | 113 | asCfsaucg(Tgn)u | 387 | AGGAUCAGUUACGGA | 661 |
| 392750 | AfCfGfgaaacgaug | | uccguAfaCfugauc | | AACGAUGC | |
| | uL96 | | scsu | | | |
| AD- | usascgg(Ahd)Afa | 114 | asAfsugag(Agn)g | 388 | GUUACGGAAACGAUG | 662 |
| 392751 | CfGfAfugcucucau | | caucgUfuUfccgua | | CUCUCAUG | |
| | uL96 | | sasc | | | |
| AD- | usgsauu(Uhd)Afc | 115 | asAfsggcg(Agn)u | 389 | UAUGAUUUACUCAUU | 663 |
| 392752 | UfCfAfuuaucgccu | | aaugaGfuAfaauca | | AUCGCCUU | |
| | uL96 | | susa | | | |
| AD- | gsusaga(Uhd)Gfc | 116 | asAfsuuca(Agn)g | 390 | AAGUAGAUGCCUGAA | 664 |
| 392753 | CfUfGfaacuugaau | | uucagGfcAfucuac | | CUUGAAUU | |
| | uL96 | | susu | | | |
| AD- | ususgua(Uhd)Afu | 117 | asAfsccac(Agn)a | 391 | AGUUGUAUAUUAUUC | 665 |
| 392754 | UfAfUfucuuguggu | | gaauaAfuAfuacaa | | UUGUGGUU | |
| | uL96 | | scsu | | | |
| AD- | asusugc(Uhd)Gfc | 118 | asAfsauau(Agn)g | 392 | AGAUUGCUGCUUCUG | 666 |
| 392755 | UfUfCfugcuauauu | | cagaaGfcAfgcaau | | CUAUAUUU | |
| | uL96 | | scsu | | | |
| AD- | usgscua(Uhd)Afu | 119 | usCfscuau(Agn)u | 393 | UCUGCUAUAUUUGUG | 667 |
| 392756 | UfUfGfugauauagg | | cacaaAfuAfuagca | | AUAUAGGA | |
| | aL96 | | sgsa | | | |
| AD- | ascsaca(Uhd)Ufa | 120 | asAfsgucu(Cgn)a | 394 | GCACACAUUAGGCAU | 668 |
| 392757 | GfGfCfauugagacu | | augccUfaAfugugu | | UGAGACUU | |
| | uL96 | | sgsc | | | |
| AD- | asasgaa(Uhd)Cfc | 121 | usUfsacaa(Tgn)g | 395 | AAAAGAAUCCCUGUU | 669 |
| 392758 | CfUfGfuucauugua | | aacagGfgAfuucuu | | CAUUGUAA | |
| | aL96 | | susu | | | |
| AD- | csasuug(Uhd)Afa | 122 | asCfscgua(Agn)a | 396 | UUCAUUGUAAGCACU | 670 |
| 392759 | GfCfAfcuuuuacgg | | agugcUfuAfcaaug | | UUUACGGG | |
| | uL96 | | sasa | | | |
| AD- | ususgcu(Uhd)Afu | 123 | asAfsgcga(Tgn)c | 397 | CAUUGCUUAUGACAU | 671 |
| 392760 | GfAfCfaugaucgcu | | augucAfuAfagcaa | | GAUCGCUU | |
| | uL96 | | susg | | | |
| AD- | csasagg(Ahd)Ufc | 124 | asGfsuuuc(Cgn)g | 398 | ACCAAGGAUCAGUUA | 672 |
| 392761 | AfGfUfuacggaaac | | uaacuGfaUfccuug | | CGGAAACG | |
| | uL96 | | sgsu | | | |
| AD- | asgsguu(Chd)Ufg | 125 | asUfsauuu(Ggn)u | 399 | CCAGGUUCUGGGUUG | 673 |
| 392762 | GfGfUfugacaaaua | | caaccCfaGfaaccu | | ACAAAUAU | |
| | uL96 | | sgsg | | | |
| AD- | asasgau(Ghd)Ufg | 126 | asUfsuugu(Tgn)u | 400 | AGAAGAUGUGGGUUC | 674 |
| 392763 | GfGfUfucaaacaaa | | gaaccCfaCfaucuu | | AAACAAAG | |
| | uL96 | | scsu | | | |
| AD- | csusgaa(Ghd)Afa | 127 | usGfsugua(Cgn)u | 401 | UGCUGAAGAAGAAAC | 675 |
| 392764 | GfAfAfacaguacac | | guuucUfuCfuucag | | AGUACACA | |
| | aL96 | | scsa | | | |
| AD- | asasguu(Ghd)Gfa | 128 | asAfsuggu(Tgn)u | 402 | UGAAGUUGGACAGCA | 676 |
| 392765 | CfAfGfcaaaaccau | | ugcugUfcCfaacuu | | AAACCAUU | |
| | uL96 | | scsa | | | |
| AD- | asuscgg(Uhd)Gfu | 129 | asUfsucua(Tgn)a | 403 | CCAUCGGUGUCCAUU | 677 |
| 392766 | CfCfAfuuuauagaa | | aauggAfcAfccgau | | UAUAGAAU | |
| | uL96 | | sgsg | | | |
| AD- | uscsggu(Ghd)Ufc | 130 | usAfsuucu(Agn)u | 404 | CAUCGGUGUCCAUUU | 678 |
| 392767 | CfAfUfuuauagaau | | aaaugGfaCfaccga | | AUAGAAUA | |
| | aL96 | | susg | | | |
| AD- | gscsugu(Ahd)Afc | 131 | asGfscauc(Tgn)a | 405 | GUGCUGUAACACAAG | 679 |
| 392768 | AfCfAfaguagaugc | | cuuguGfuUfacagc | | UAGAUGCC | |
| | uL96 | | sasc | | | |
| AD- | asasgua(Ghd)Afu | 132 | usUfscaag(Tgn)u | 406 | ACAAGUAGAUGCCUG | 680 |
| 392769 | GfCfCfugaacuuga | | caggcAfuCfuacuu | | AACUUGAA | |
| | aL96 | | sgsu | | | |
| AD- | ususgug(Ghd)Ufu | 133 | usAfsauug(Ggn)g | 407 | UCUUGUGGUUUGUGA | 681 |
| 392770 | UfGfUfgacccaauu | | ucacaAfaCfcacaa | | CCCAAUUA | |
| | aL96 | | sgsa | | | |
| AD- | gsusuug(Uhd)Gfa | 134 | asGfsacuu(Agn)a | 408 | UGGUUUGUGACCCAA | 682 |
| 392771 | CfCfCfaauuaaguc | | uugggUfcAfcaaac | | UUAAGUCC | |
| | uL96 | | scsa | | | |
| AD- | gsusgac(Chd)Cfa | 135 | asGfsuagg(Agn)c | 409 | UUGUGACCCAAUUAA | 683 |
| 392772 | AfUfUfaaguccuac | | uuaauUfgGfgucac | | GUCCUACU | |
| | uL96 | | sasa | | | |
| AD- | usasugc(Uhd)Ufu | 136 | asCfscauc(Ggn)a | 410 | CAUAUGCUUUAAGAA | 684 |
| 392773 | AfAfGfaaucgaugg | | uucuuAfaAfgcaua | | UCGAUGGG | |
| | uL96 | | susg | | | |
| AD- | ususugu(Ghd)Afu | 137 | usCfsuuaa(Tgn)u | 411 | UAUUUGUGAUAUAGG | 685 |
| 392774 | AfUfAfggaauuaag | | ccuauAfuCfacaaa | | AAUUAAGA | |
| | aL96 | | susa | | | |
| AD- | asasaga(Ahd)Ufc | 138 | usAfscaau(Ggn)a | 412 | GAAAAGAAUCCCUGU | 686 |
| 392775 | CfCfUfguucauugu | | acaggGfaUfucuuu | | UCAUUGUA | |
| | aL96 | | susc | | | |
| AD- | usgsauu(Ghd)Ufa | 139 | asGfscaau(Ggn)a | 413 | GAUGAUUGUACAGAA | 687 |
| 392776 | CfAfGfaaucauugc | | uucugUfaCfaauca | | UCAUUGCU | |
| | uL96 | | susc | | | |
| AD- | usgsccu(Ghd)Gfa | 140 | asAfsagaa(Ggn)g | 414 | CAUGCCUGGACAAAC | 688 |
| 392777 | CfAfAfacccuucuu | | guuugUfcCfaggca | | CCUUCUUU | |
| | uL96 | | susg | | | |
| AD- | gsasgca(Ahd)Afa | 141 | asUfscauc(Tgn)g | 415 | AAGAGCAAAACUAUU | 689 |
| 392778 | CfUfAfuucagauga | | aauagUfuUfugcuc | | CAGAUGAC | |
| | uL96 | | susu | | | |
| AD- | asgsuga(Ahd)Cfc | 142 | asUfsaacu(Ggn)a | 416 | UUAGUGAACCAAGGA | 690 |
| 392779 | AfAfGfgaucaguua | | uccuuGfgUfucacu | | UCAGUUAC | |
| | uL96 | | sasa | | | |
| AD- | usgsaac(Chd)Afa | 143 | asCfsguaa(Cgn)u | 417 | AGUGAACCAAGGAUC | 691 |
| 392780 | GfGfAfucaguuacg | | gauccUfuGfguuca | | AGUUACGG | |
| | uL96 | | scsu | | | |
| AD- | csasguu(Ahd)Cfg | 144 | asGfsagca(Tgn)c | 418 | AUCAGUUACGGAAAC | 692 |
| 392781 | GfAfAfacgaugcuc | | guuucCfgUfaacug | | GAUGCUCU | |
| | uL96 | | sasu | | | |
| AD- | asgsaag(Ahd)Ufg | 145 | usUfsguuu(Ggn)a | 419 | GCAGAAGAUGUGGGU | 693 |
| 392782 | UfGfGfguucaaaca | | acccaCfaUfcuucu | | UCAAACAA | |
| | aL96 | | sgsc | | | |
| AD- | cscsucu(Ghd)Afa | 146 | usUfsugcu(Ggn)u | 420 | AGCCUCUGAAGUUGG | 694 |
| 392783 | GfUfUfggacagcaa | | ccaacUfuCfagagg | | ACAGCAAA | |
| | aL96 | | scsu | | | |
| AD- | ususaug(Ahd)Ufu | 147 | asCfsgaua(Agn)u | 421 | UUUUAUGAUUUACUC | 695 |
| 392784 | UfAfCfucauuaucg | | gaguaAfaUfcauaa | | AUUAUCGC | |
| | uL96 | | sasa | | | |
| AD- | ascsagc(Uhd)Gfu | 148 | asUfsugug(Tgn)u | 422 | UGACAGCUGUGCUGU | 696 |
| 392785 | GfCfUfguaacacaa | | acagcAfcAfgcugu | | AACACAAG | |
| | uL96 | | scsa | | | |
| AD- | usgsuga(Chd)Cfc | 149 | asUfsagga(Cgn)u | 423 | UUUGUGACCCAAUUA | 697 |
| 392786 | AfAfUfuaaguccua | | uaauuGfgGfucaca | | AGUCCUAC | |
| | uL96 | | sasa | | | |
| AD- | usascau(Ahd)Ufg | 150 | usCfsgauu(Cgn)u | 424 | UUUACAUAUGCUUUA | 698 |
| 392787 | CfUfUfuaagaaucg | | uaaagCfaUfaugua | | AGAAUCGA | |
| | aL96 | | sasa | | | |
| AD- | gsusaaa(Uhd)Afa | 151 | usCfscaag(Agn)a | 425 | AUGUAAAUAAAUACA | 699 |
| 392788 | AfUfAfcauucuugg | | uguauUfuAfuuuac | | UUCUUGGA | |
| | aL96 | | sasu | | | |
| AD- | uscsagu(Uhd)Afc | 152 | asAfsgcau(Cgn)g | 426 | GAUCAGUUACGGAAA | 700 |
| 392789 | GfGfAfaacgaugcu | | uuuccGfuAfacuga | | CGAUGCUC | |
| | uL96 | | susc | | | |
| AD- | csusucc(Chd)Gfu | 153 | asAfsacuc(Tgn)c | 427 | UCCUUCCCGUGAAUG | 701 |
| 392790 | GfAfAfuggagaguu | | cauucAfcGfggaag | | GAGAGUUC | |
| | uL96 | | sgsa | | | |
| AD- | asgsuug(Ghd)Afc | 154 | asAfsaugg(Tgn)u | 428 | GAAGUUGGACAGCAA | 702 |
| 392791 | AfGfCfaaaaccauu | | uugcuGfuCfcaacu | | AACCAUUG | |
| | uL96 | | susc | | | |
| AD- | cscscau(Chd)Gfg | 155 | asUfsauaa(Agn)u | 429 | UACCCAUCGGUGUCC | 703 |
| 392792 | UfGfUfccauuuaua | | ggacaCfcGfauggg | | AUUUAUAG | |
| | uL96 | | susa | | | |
| AD- | usgscac(Ahd)Cfa | 156 | usCfsucaa(Tgn)g | 430 | UGUGCACACAUUAGG | 704 |
| 392793 | UfUfAfggcauugag | | ccuaaUfgUfgugca | | CAUUGAGA | |
| | aL96 | | scsa | | | |
| AD- | cscsaac(Ahd)Ufg | 157 | usUfsgguu(Cgn)a | 431 | GGCCAACAUGAUUAG | 705 |
| 392794 | AfUfUfagugaacca | | cuaauCfaUfguugg | | UGAACCAA | |
| | aL96 | | scsc | | | |
| AD- | asusgau(Uhd)Afg | 158 | asAfsuccu(Tgn)g | 432 | ACAUGAUUAGUGAAC | 706 |
| 392795 | UfGfAfaccaaggau | | guucaCfuAfaucau | | CAAGGAUC | |
| | uL96 | | sgsu | | | |
| AD- | ususagu(Ghd)Afa | 159 | asAfscuga(Tgn)c | 433 | GAUUAGUGAACCAAG | 707 |
| 392796 | CfCfAfaggaucagu | | cuuggUfuCfacuaa | | GAUCAGUU | |
| | uL96 | | susc | | | |
| AD- | asascca(Ahd)Gfg | 160 | usUfsccgu(Agn)a | 434 | UGAACCAAGGAUCAG | 708 |
| 392797 | AfUfCfaguuacgga | | cugauCfcUfugguu | | UUACGGAA | |
| | aL96 | | scsa | | | |
| AD- | gsusuac(Ghd)Gfa | 161 | usGfsagag(Cgn)a | 435 | CAGUUACGGAAACGA | 709 |
| 392798 | AfAfCfgaugcucuc | | ucguuUfcCfguaac | | UGCUCUCA | |
| | aL96 | | susg | | | |
| AD- | gsasugc(Ahd)Gfa | 162 | asUfscaug(Tgn)c | 436 | UGGAUGCAGAAUUCC | 710 |
| 392799 | AfUfUfccgacauga | | ggaauUfcUfgcauc | | GACAUGAC | |
| | uL96 | | scsa | | | |
| AD- | ususgga(Chd)Afg | 163 | asGfscaau(Ggn)g | 437 | AGUUGGACAGCAAAA | 711 |
| 392800 | CfAfAfaaccauugc | | uuuugCfuGfuccaa | | CCAUUGCU | |
| | uL96 | | scsu | | | |
| AD- | asasacc(Ahd)Ufu | 164 | usGfsggua(Ggn)u | 438 | CAAAACCAUUGCUUC | 712 |
| 392801 | GfCfUfucacuaccc | | gaagcAfaUfgguuu | | ACUACCCA | |
| | aL96 | | susg | | | |
| AD- | cscsauc(Ghd)Gfu | 165 | usCfsuaua(Agn)a | 439 | ACCCAUCGGUGUCCA | 713 |
| 392802 | GfUfCfcauuuauag | | uggacAfcCfgaugg | | UUUAUAGA | |
| | aL96 | | sgsu | | | |
| AD- | ususauc(Ghd)Cfc | 166 | asCfsagcu(Ggn)u | 440 | CAUUAUCGCCUUUUG | 714 |
| 392803 | UfUfUfugacagcug | | caaaaGfgCfgauaa | | ACAGCUGU | |
| | uL96 | | susg | | | |
| AD- | asuscgc(Chd)Ufu | 167 | asCfsacag(Cgn)u | 441 | UUAUCGCCUUUUGAC | 715 |
| 392804 | UfUfGfacagcugug | | gucaaAfaGfgcgau | | AGCUGUGC | |
| | uL96 | | sasa | | | |
| AD- | ascsaca(Ahd)Gfu | 168 | asGfsuuca(Ggn)g | 442 | UAACACAAGUAGAUG | 716 |
| 392805 | AfGfAfugccugaac | | caucuAfcUfugugu | | CCUGAACU | |
| | uL96 | | susa | | | |
| AD- | usgsugg(Uhd)Ufu | 169 | usUfsaauu(Ggn)g | 443 | CUUGUGGUUUGUGAC | 717 |
| 392806 | GfUfGfacccaauua | | gucacAfaAfccaca | | CCAAUUAA | |
| | aL96 | | sasg | | | |
| AD- | gsgsgau(Ghd)Cfu | 170 | asAfscguu(Cgn)a | 444 | GGGGGAUGCUUCAUG | 718 |
| 392807 | UfCfAfugugaacgu | | caugaAfgCfauccc | | UGAACGUG | |
| | uL96 | | scsc | | | |
| AD- | usgsugc(Ahd)Cfa | 171 | usCfsaaug(Cgn)c | 445 | UAUGUGCACACAUUA | 719 |
| 392808 | CfAfUfuaggcauug | | uaaugUfgUfgcaca | | GGCAUUGA | |
| | aL96 | | susa | | | |
| AD- | asasaug(Ghd)Afa | 172 | asUfsuaua(Tgn)u | 446 | GAAAAUGGAAGUGGC | 720 |
| 392809 | GfUfGfgcaauauaa | | gccacUfuCfcauuu | | AAUAUAAG | |
| | uL96 | | susc | | | |
| AD- | asusgga(Ahd)Gfu | 173 | asCfscuua(Tgn)a | 447 | AAAUGGAAGUGGCAA | 721 |
| 392810 | GfGfCfaauauaagg | | uugccAfcUfuccau | | UAUAAGGG | |
| | uL96 | | susu | | | |
| AD- | usgsccc(Ghd)Afg | 174 | asGfsuuua(Agn)c | 448 | CUUGCCCGAGAUCCU | 722 |
| 392811 | AfUfCfcuguuaaac | | aggauCfuCfgggca | | GUUAAACU | |
| | uL96 | | sasg | | | |
| AD- | asusuag(Uhd)Gfa | 175 | asCfsugau(Cgn)c | 449 | UGAUUAGUGAACCAA | 723 |
| 392812 | AfCfCfaaggaucag | | uugguUfcAfcuaau | | GGAUCAGU | |
| | uL96 | | scsa | | | |
| AD- | gsasacc(Ahd)Afg | 176 | usCfscgua(Agn)c | 450 | GUGAACCAAGGAUCA | 724 |
| 392813 | GfAfUfcaguuacgg | | ugaucCfuUfgguuc | | GUUACGGA | |
| | aL96 | | sasc | | | |
| AD- | asasgga(Uhd)Cfa | 177 | usCfsguuu(Cgn)c | 451 | CCAAGGAUCAGUUAC | 725 |
| 392814 | GfUfUfacggaaacg | | guaacUfgAfuccuu | | GGAAACGA | |
| | aL96 | | sgsg | | | |
| AD- | csasaca(Chd)Afg | 178 | usCfsaacu(Tgn)c | 452 | GCCAACACAGAAAAC | 726 |
| 392815 | AfAfAfacgaaguug | | guuuuCfuGfuguug | | GAAGUUGA | |
| | aL96 | | sgsc | | | |
| AD- | usgsggu(Uhd)Cfa | 179 | usUfsgcac(Cgn)u | 453 | UGUGGGUUCAAACAA | 727 |
| 392816 | AfAfCfaaaggugca | | uuguuUfgAfaccca | | AGGUGCAA | |
| | aL96 | | scsa | | | |
| AD- | csasgug(Ahd)Ufc | 180 | asCfsaagg(Tgn)g | 454 | GACAGUGAUCGUCAU | 728 |
| 392817 | GfUfCfaucaccuug | | augacGfaUfcacug | | CACCUUGG | |
| | uL96 | | susc | | | |
| AD- | ascscca(Uhd)Cfg | 181 | usAfsuaaa(Tgn)g | 455 | CUACCCAUCGGUGUC | 729 |
| 392818 | GfUfGfuccauuuau | | gacacCfgAfugggu | | CAUUUAUA | |
| | aL96 | | sasg | | | |
| AD- | uscsuug(Uhd)Gfg | 182 | asUfsuggg(Tgn)c | 456 | AUUCUUGUGGUUUGU | 730 |
| 392819 | UfUfUfgugacccaa | | acaaaCfcAfcaaga | | GACCCAAU | |
| | uL96 | | sasu | | | |
| AD- | ususugu(Ghd)Afc | 183 | asGfsgacu(Tgn)a | 457 | GGUUUGUGACCCAAU | 731 |
| 392820 | CfCfAfauuaagucc | | auuggGfuCfacaaa | | UAAGUCCU | |
| | uL96 | | scsc | | | |
| AD- | ususgug(Ahd)Cfc | 184 | usAfsggac(Tgn)u | 458 | GUUUGUGACCCAAUU | 732 |
| 392821 | CfAfAfuuaaguccu | | aauugGfgUfcacaa | | AAGUCCUA | |
| | aL96 | | sasc | | | |
| AD- | ususcag(Ahd)Ufg | 185 | usUfsggcc(Agn)a | 459 | UAUUCAGAUGACGUC | 733 |
| 392822 | AfCfGfucuuggcca | | gacguCfaUfcugaa | | UUGGCCAA | |
| | aL96 | | susa | | | |
| AD- | asuscag(Uhd)Ufa | 186 | asGfscauc(Ggn)u | 460 | GGAUCAGUUACGGAA | 734 |
| 392823 | CfGfGfaaacgaugc | | uuccgUfaAfcugau | | ACGAUGCU | |
| | uL96 | | scsc | | | |
| AD- | usgsgau(Ghd)Cfa | 187 | asAfsuguc(Ggn)g | 461 | GAUGGAUGCAGAAUU | 735 |
| 392824 | GfAfAfuuccgacau | | aauucUfgCfaucca | | CCGACAUG | |
| | uL96 | | susc | | | |
| AD- | gsuscca(Ahd)Gfa | 188 | asCfsguuc(Tgn)g | 462 | CUGUCCAAGAUGCAG | 736 |
| 392825 | UfGfCfagcagaacg | | cugcaUfcUfuggac | | CAGAACGG | |
| | uL96 | | sasg | | | |
| AD- | usasccc(Ahd)Ufc | 189 | asUfsaaau(Ggn)g | 463 | ACUACCCAUCGGUGU | 737 |
| 392826 | GfGfUfguccauuua | | acaccGfaUfgggua | | CCAUUUAU | |
| | uL96 | | sgsu | | | |
| AD- | ususuug(Ahd)Cfa | 190 | asUfsuaca(Ggn)c | 464 | CCUUUUGACAGCUGU | 738 |
| 392827 | GfCfUfgugcuguaa | | acagcUfgUfcaaaa | | GCUGUAAC | |
| | uL96 | | sgsg | | | |
| AD- | ususgac(Ahd)Gfc | 191 | asUfsguua(Cgn)a | 465 | UUUUGACAGCUGUGC | 739 |
| 392828 | UfGfUfgcuguaaca | | gcacaGfcUfgucaa | | UGUAACAC | |
| | uL96 | | sasa | | | |
| AD- | asgscug(Uhd)Gfc | 192 | usAfscuug(Tgn)g | 466 | ACAGCUGUGCUGUAA | 740 |
| 392829 | UfGfUfaacacaagu | | uuacaGfcAfcagcu | | CACAAGUA | |
| | aL96 | | sgsu | | | |
| AD- | gsusuuu(Ahd)Ufg | 193 | asCfsuaau(Ggn)u | 467 | CUGUUUUAUGUGCAC | 741 |
| 392830 | UfGfCfacacauuag | | gugcaCfaUfaaaac | | ACAUUAGG | |
| | uL96 | | sasg | | | |
| AD- | ususcaa(Uhd)Ufa | 194 | asGfsagaa(Tgn)u | 468 | UCUUCAAUUACCAAG | 742 |
| 392831 | CfCfAfagaauucuc | | cuuggUfaAfuugaa | | AAUUCUCC | |
| | uL96 | | sgsa | | | |
| AD- | csascac(Ahd)Ufc | 195 | asGfsaaua(Cgn)a | 469 | UCCACACAUCAGUAA | 743 |
| 392832 | AfGfUfaauguauuc | | uuacuGfaUfgugug | | UGUAUUCU | |
| | uL96 | | sgsa | | | |
| AD- | usgsguc(Uhd)Cfu | 196 | asAfsuaau(Ggn)u | 470 | UUUGGUCUCUAUACU | 744 |
| 392833 | AfUfAfcuacauuau | | aguauAfgAfgacca | | ACAUUAUU | |
| | uL96 | | sasa | | | |
| AD- | ascsccg(Uhd)Ufu | 197 | usGfsagua(Agn)a | 471 | AAACCCGUUUUAUGA | 745 |
| 392834 | UfAfUfgauuuacuc | | ucauaAfaAfcgggu | | UUUACUCA | |
| | aL96 | | susu | | | |
| AD- | usascga(Ahd)Afa | 198 | asUfsugua(Ggn)g | 472 | GCUACGAAAAUCCAA | 746 |
| 392835 | UfCfCfaaccuacaa | | uuggaUfuUfucgua | | CCUACAAG | |
| | uL96 | | sgsc | | | |
| AD- | uscscac(Ahd)Cfa | 199 | asAfsuaca(Tgn)u | 473 | AAUCCACACAUCAGU | 747 |
| 392836 | UfCfAfguaauguau | | acugaUfgUfgugga | | AAUGUAUU | |
| | uL96 | | susu | | | |
| AD- | csusggu(Chd)Ufu | 200 | usUfscuug(Ggn)u | 474 | UGCUGGUCUUCAAUU | 748 |
| 392837 | CfAfAfuuaccaaga | | aauugAfaGfaccag | | ACCAAGAA | |
| | aL96 | | scsa | | | |
| AD- | gscscau(Chd)Ufu | 201 | usUfscguu(Tgn)c | 475 | AUGCCAUCUUUGACC | 749 |
| 392838 | UfGfAfccgaaacga | | ggucaAfaGfauggc | | GAAACGAA | |
| | aL96 | | sasu | | | |
| AD- | cscsauc(Uhd)Ufu | 202 | usUfsucgu(Tgn)u | 476 | UGCCAUCUUUGACCG | 750 |
| 392839 | GfAfCfcgaaacgaa | | cggucAfaAfgaugg | | AAACGAAA | |
| | aL96 | | scsa | | | |
| AD- | csusacg(Ahd)Afa | 203 | usUfsguag(Ggn)u | 477 | GGCUACGAAAAUCCA | 751 |
| 392840 | AfUfCfcaaccuaca | | uggauUfuUfcguag | | ACCUACAA | |
| | aL96 | | scsc | | | |
| AD- | asuscca(Chd)Afc | 204 | asUfsacau(Tgn)a | 478 | UAAUCCACACAUCAG | 752 |
| 392841 | AfUfCfaguaaugua | | cugauGfuGfuggau | | UAAUGUAU | |
| | uL96 | | susa | | | |
| AD- | csasugc(Chd)Afu | 205 | asUfsuucg(Ggn)u | 479 | CUCAUGCCAUCUUUG | 753 |
| 392842 | CfUfUfugaccgaaa | | caaagAfuGfgcaug | | ACCGAAAC | |
| | uL96 | | sasg | | | |
| AD- | gsgscua(Chd)Gfa | 206 | asUfsaggu(Tgn)g | 480 | ACGGCUACGAAAAUC | 754 |
| 392843 | AfAfAfuccaaccua | | gauuuUfcGfuagcc | | CAACCUAC | |
| | uL96 | | sgsu | | | |
| AD- | uscsaug(Chd)Cfa | 207 | usUfsucgg(Tgn)c | 481 | UCUCAUGCCAUCUUU | 755 |
| 392844 | UfCfUfuugaccgaa | | aaagaUfgGfcauga | | GACCGAAA | |
| | aL96 | | sgsa | | | |
| AD- | csasgua(Chd)Afc | 208 | asUfsgaug(Agn)a | 482 | AACAGUACACAUCCA | 756 |
| 392845 | AfUfCfcauucauca | | uggauGfuGfuacug | | UUCAUCAU | |
| | uL96 | | susu | | | |
| AD- | asascgg(Chd)Ufa | 209 | asGfsuugg(Agn)u | 483 | AGAACGGCUACGAAA | 757 |
| 392846 | CfGfAfaaauccaac | | uuucgUfaGfccguu | | AUCCAACC | |
| | uL96 | | scsu | | | |
| AD- | gsasagu(Uhd)Ufc | 210 | usUfsguau(Cgn)a | 484 | CUGAAGUUUCAUUUA | 758 |
| 392847 | AfUfUfuaugauaca | | uaaauGfaAfacuuc | | UGAUACAA | |
| | aL96 | | sasg | | | |
| AD- | asusgcc(Ahd)Ufc | 211 | asGfsuuuc(Ggn)g | 485 | UCAUGCCAUCUUUGA | 759 |
| 392848 | UfUfUfgaccgaaac | | ucaaaGfaUfggcau | | CCGAAACG | |
| | uL96 | | sgsa | | | |
| AD- | gsasacg(Ghd)Cfu | 212 | asUfsugga(Tgn)u | 486 | CAGAACGGCUACGAA | 760 |
| 392849 | AfCfGfaaaauccaa | | uucguAfgCfcguuc | | AAUCCAAC | |
| | uL96 | | susg | | | |
| AD- | uscsuuc(Ghd)Ufg | 213 | asAfscaua(Agn)a | 487 | UUUCUUCGUGCCUGU | 761 |
| 392850 | CfCfUfguuuuaugu | | acaggCfaCfgaaga | | UUUAUGUG | |
| | uL96 | | sasa | | | |
| AD- | ususgcc(Chd)Gfa | 214 | asUfsuuaa(Cgn)a | 488 | UCUUGCCCGAGAUCC | 762 |
| 392851 | GfAfUfccuguuaaa | | ggaucUfcGfggcaa | | UGUUAAAC | |
| | uL96 | | sgsa | | | |
| AD- | csusucg(Uhd)Gfc | 215 | asCfsacau(Agn)a | 489 | UUCUUCGUGCCUGUU | 763 |
| 392852 | CfUfGfuuuuaugug | | aacagGfcAfcgaag | | UUAUGUGC | |
| | uL96 | | sasa | | | |
| AD- | gscsgcc(Ahd)Ufg | 216 | asUfsaaac(Tgn)u | 490 | CAGCGCCAUGUCCCA | 764 |
| 392853 | UfCfCfcaaaguuua | | ugggaCfaUfggcgc | | AAGUUUAC | |
| | uL96 | | susg | | | |
| AD- | gsuscau(Ahd)Gfc | 217 | asAfscgau(Cgn)a | 491 | UUGUCAUAGCGACAG | 765 |
| 392854 | GfAfCfagugaucgu | | cugucGfcUfaugac | | UGAUCGUC | |
| | uL96 | | sasa | | | |
| AD- | gscsuac(Ghd)Afa | 218 | usGfsuagg(Tgn)u | 492 | CGGCUACGAAAAUCC | 766 |
| 392855 | AfAfUfccaaccuac | | ggauuUfuCfguagc | | AACCUACA | |
| | aL96 | | scsg | | | |
| AD- | asusagc(Ghd)Afc | 219 | asAfsugac(Ggn)a | 493 | UCAUAGCGACAGUGA | 767 |
| 392856 | AfGfUfgaucgucau | | ucacuGfuCfgcuau | | UCGUCAUC | |
| | uL96 | | sgsa | | | |
| AD- | csusugc(Chd)Cfg | 220 | usUfsuaac(Agn)g | 494 | CUCUUGCCCGAGAUC | 768 |
| 392857 | AfGfAfuccuguuaa | | gaucuCfgGfgcaag | | CUGUUAAA | |
| | aL96 | | sasg | | | |
| AD- | csuscau(Ghd)Cfc | 221 | usUfscggu(Cgn)a | 495 | CUCUCAUGCCAUCUU | 769 |
| 392858 | AfUfCfuuugaccga | | aagauGfgCfaugag | | UGACCGAA | |
| | aL96 | | sasg | | | |
| AD- | ascsggc(Uhd)Afc | 222 | asGfsguug(Ggn)a | 496 | GAACGGCUACGAAAA | 770 |
| 392859 | GfAfAfaauccaacc | | uuuucGfuAfgccgu | | UCCAACCU | |
| | uL96 | | susc | | | |
| AD- | csasuca(Ahd)Afa | 223 | asAfsagaa(Cgn)a | 497 | AUCAUCAAAAAUUGG | 771 |
| 392860 | AfUfUfgguguucuu | | ccaauUfuUfugaug | | UGUUCUUU | |
| | uL96 | | sasu | | | |
| AD- | asuscca(Ahd)Cfc | 224 | csAfsaaga(Agn)c | 498 | AAAUCCAACCUACAA | 772 |
| 392861 | UfAfCfaaguucuuu | | uuguaGfgUfuggau | | GUUCUUUG | |
| | gL96 | | susu | | | |
| AD- | csgscuu(Uhd)Cfu | 225 | usGfsuaau(Agn)c | 499 | AUCGCUUUCUACACU | 773 |
| 392862 | AfCfAfcuguauuac | | aguguAfgAfaagcg | | GUAUUACA | |
| | aL96 | | sasu | | | |
| AD- | uscscaa(Chd)Cfu | 226 | usCfsaaag(Agn)a | 500 | AAUCCAACCUACAAG | 774 |
| 392863 | AfCfAfaguucuuug | | cuuguAfgGfuugga | | UUCUUUGA | |
| | aL96 | | susu | | | |
| AD- | uscsucu(Chd)Ufu | 227 | asGfsacca(Agn)a | 501 | UAUCUCUCUUUACAU | 775 |
| 392864 | UfAfCfauuuugguc | | auguaAfaGfagaga | | UUUGGUCU | |
| | uL96 | | susa | | | |
| AD- | csuscuc(Uhd)Ufu | 228 | asAfsgacc(Agn)a | 502 | AUCUCUCUUUACAUU | 776 |
| 392865 | AfCfAfuuuuggucu | | aauguAfaAfgagag | | UUGGUCUC | |
| | uL96 | | sasu | | | |
| AD- | ususugu(Ghd)Ufa | 229 | asAfsauuc(Tgn)u | 503 | GUUUUGUGUACUGUA | 777 |
| 392866 | CfUfGfuaaagaauu | | uacagUfaCfacaaa | | AAGAAUUU | |
| | uL96 | | sasc | | | |
| AD- | gsusgua(Chd)Ufg | 230 | asCfsuaaa(Tgn)u | 504 | UUGUGUACUGUAAAG | 778 |
| 392867 | UfAfAfagaauuuag | | cuuuaCfaGfuacac | | AAUUUAGC | |
| | uL96 | | sasa | | | |
| AD- | ascscca(Ahd)Ufu | 231 | usAfsaagu(Agn)g | 505 | UGACCCAAUUAAGUC | 779 |
| 392868 | AfAfGfuccuacuuu | | gacuuAfaUfugggu | | CUACUUUA | |
| | aL96 | | scsa | | | |
| AD- | uscscua(Chd)Ufu | 232 | usAfsaagc(Agn)u | 506 | AGUCCUACUUUACAU | 780 |
| 392869 | UfAfCfauaugcuuu | | auguaAfaGfuagga | | AUGCUUUA | |
| | aL96 | | scsu | | | |
| AD- | cscsuac(Uhd)Ufu | 233 | usUfsaaag(Cgn)a | 507 | GUCCUACUUUACAUA | 781 |
| 392870 | AfCfAfuaugcuuua | | uauguAfaAfguagg | | UGCUUUAA | |
| | aL96 | | sasc | | | |
| AD- | ususcua(Chd)Afc | 234 | usUfsuaug(Tgn)a | 508 | CUUUCUACACUGUAU | 782 |
| 392871 | UfGfUfauuacauaa | | auacaGfuGfuagaa | | UACAUAAA | |
| | aL96 | | sasg | | | |
| AD- | uscsuac(Ahd)Cfu | 235 | asUfsuuau(Ggn)u | 509 | UUUCUACACUGUAUU | 783 |
| 392872 | GfUfAfuuacauaaa | | aauacAfgUfguaga | | ACAUAAAU | |
| | uL96 | | sasa | | | |
| AD- | csusuuu(Ahd)Afg | 236 | asUfsugaa(Ggn)a | 510 | UUCUUUUAAGAUGUG | 784 |
| 392873 | AfUfGfugucuucaa | | cacauCfuUfaaaag | | UCUUCAAU | |
| | uL96 | | sasa | | | |
| AD- | asusgug(Uhd)Cfu | 237 | usUfsauac(Agn)a | 511 | AGAUGUGUCUUCAAU | 785 |
| 392874 | UfCfAfauuuguaua | | auugaAfgAfcacau | | UUGUAUAA | |
| | aL96 | | scsu | | | |
| AD- | asuscaa(Ahd)Afa | 238 | csAfsaaga(Agn)c | 512 | UCAUCAAAAAUUGGU | 786 |
| 392875 | UfUfGfguguucuuu | | accaaUfuUfuugau | | GUUCUUUG | |
| | gL96 | | sgsa | | | |
| AD- | asasauc(Chd)Afa | 239 | asAfsgaac(Tgn)u | 513 | GAAAAUCCAACCUAC | 787 |
| 392876 | CfCfUfacaaguucu | | guaggUfuGfgauuu | | AAGUUCUU | |
| | uL96 | | susc | | | |
| AD- | gsusacu(Ghd)Ufa | 240 | asAfsgcua(Agn)a | 514 | GUGUACUGUAAAGAA | 788 |
| 392877 | AfAfGfaauuuagcu | | uucuuUfaCfaguac | | UUUAGCUG | |
| | uL96 | | sasc | | | |
| AD- | csusccu(Ghd)Afu | 241 | usAfsugug(Agn)u | 515 | CUCUCCUGAUUAUUU | 789 |
| 392878 | UfAfUfuuaucacau | | aaauaAfuCfaggag | | AUCACAUA | |
| | aL96 | | sasg | | | |
| AD- | gscscag(Uhd)Ufg | 242 | asAfsagaa(Tgn)a | 516 | UAGCCAGUUGUAUAU | 790 |
| 392879 | UfAfUfauuauucuu | | auauaCfaAfcuggc | | UAUUCUUG | |
| | uL96 | | susa | | | |
| AD- | asasuua(Ahd)Gfu | 243 | usAfsugua(Agn)a | 517 | CCAAUUAAGUCCUAC | 791 |
| 392880 | CfCfUfacuuuacau | | guaggAfcUfuaauu | | UUUACAUA | |
| | aL96 | | sgsg | | | |
| AD- | csusugc(Chd)Ufa | 244 | asGfsaaag(Ggn)a | 518 | CUCUUGCCUAAGUAU | 792 |
| 392881 | AfGfUfauuccuuuc | | auacuUfaGfgcaag | | UCCUUUCC | |
| | uL96 | | sasg | | | |
| AD- | asusucc(Uhd)Ufu | 245 | asAfsuagu(Ggn)a | 519 | GUAUUCCUUUCCUGA | 793 |
| 392882 | CfCfUfgaucacuau | | ucaggAfaAfggaau | | UCACUAUG | |
| | uL96 | | sasc | | | |
| AD- | ascsuau(Ghd)Cfa | 246 | usUfsuaac(Tgn)u | 520 | UCACUAUGCAUUUUA | 794 |
| 392883 | UfUfUfuaaaguuaa | | uaaaaUfgCfauagu | | AAGUUAAA | |
| | aL96 | | sgsa | | | |
| AD- | usgsuuc(Ahd)Ufu | 247 | usAfsaaag(Tgn)g | 521 | CCUGUUCAUUGUAAG | 795 |
| 392884 | GfUfAfagcacuuuu | | cuuacAfaUfgaaca | | CACUUUUA | |
| | aL96 | | sgsg | | | |
| AD- | asasuua(Chd)Cfa | 248 | usUfsugga(Ggn)a | 522 | UCAAUUACCAAGAAU | 796 |
| 392885 | AfGfAfauucuccaa | | auucuUfgGfuaauu | | UCUCCAAA | |
| | aL96 | | sgsa | | | |
| AD- | ususacc(Ahd)Afg | 249 | asUfsuuug(Ggn)a | 523 | AAUUACCAAGAAUUC | 797 |
| 392886 | AfAfUfucuccaaaa | | gaauuCfuUfgguaa | | UCCAAAAC | |
| | uL96 | | susu | | | |
| AD- | uscsauu(Ghd)Cfu | 250 | asGfsauca(Tgn)g | 524 | AAUCAUUGCUUAUGA | 798 |
| 392887 | UfAfUfgacaugauc | | ucauaAfgCfaauga | | CAUGAUCG | |
| | uL96 | | susu | | | |
| AD- | ususuua(Ahd)Gfa | 251 | asAfsuuga(Agn)g | 525 | UCUUUUAAGAUGUGU | 799 |
| 392889 | UfGfUfgucuucaau | | acacaUfcUfuaaaa | | CUUCAAUU | |
| | uL96 | | sgsa | | | |
| AD- | asusccu(Ghd)Ufu | 252 | usUfsguag(Ggn)a | 526 | AGAUCCUGUUAAACU | 800 |
| 392890 | AfAfAfcuuccuaca | | aguuuAfaCfaggau | | UCCUACAA | |
| | aL96 | | scsu | | | |
| AD- | ascsuau(Uhd)Cfa | 253 | asCfsaaga(Cgn)g | 527 | AAACUAUUCAGAUGA | 801 |
| 392891 | GfAfUfgacgucuug | | ucaucUfgAfauagu | | CGUCUUGG | |
| | uL96 | | susu | | | |
| AD- | gsusuca(Uhd)Cfa | 254 | asAfsccaa(Tgn)u | 528 | AAGUUCAUCAUCAAA | 802 |
| 392892 | UfCfAfaaaauuggu | | uuugaUfgAfugaac | | AAUUGGUG | |
| | uL96 | | susu | | | |
| AD- | usasucu(Chd)Ufc | 255 | asCfscaaa(Agn)u | 529 | UCUAUCUCUCUUUAC | 803 |
| 392893 | UfUfUfacauuuugg | | guaaaGfaGfagaua | | AUUUUGGU | |
| | uL96 | | sgsa | | | |
| AD- | asuscuc(Uhd)Cfu | 256 | asAfsccaa(Agn)a | 530 | CUAUCUCUCUUUACA | 804 |
| 392894 | UfUfAfcauuuuggu | | uguaaAfgAfgagau | | UUUUGGUC | |
| | uL96 | | sasg | | | |
| AD- | usgsugu(Ahd)Cfu | 257 | asUfsaaau(Tgn)c | 531 | UUUGUGUACUGUAAA | 805 |
| 392895 | GfUfAfaagaauuua | | uuuacAfgUfacaca | | GAAUUUAG | |
| | uL96 | | sasa | | | |
| AD- | csusacu(Uhd)Ufa | 258 | asUfsuaaa(Ggn)c | 532 | UCCUACUUUACAUAU | 806 |
| 392896 | CfAfUfaugcuuuaa | | auaugUfaAfaguag | | GCUUUAAG | |
| | uL96 | | sgsa | | | |
| AD- | usgsccu(Ahd)Afg | 259 | asAfsggaa(Agn)g | 533 | CUUGCCUAAGUAUUC | 807 |
| 392897 | UfAfUfuccuuuccu | | gaauaCfuUfaggca | | CUUUCCUG | |
| | uL96 | | sasg | | | |
| AD- | asasgua(Uhd)Ufc | 260 | asUfsgauc(Agn)g | 534 | CUAAGUAUUCCUUUC | 808 |
| 392898 | CfUfUfuccugauca | | gaaagGfaAfuacuu | | CUGAUCAC | |
| | uL96 | | sasg | | | |
| AD- | gsusauu(Chd)Cfu | 261 | usAfsguga(Tgn)c | 535 | AAGUAUUCCUUUCCU | 809 |
| 392899 | UfUfCfcugaucacu | | aggaaAfgGfaauac | | GAUCACUA | |
| | aL96 | | susu | | | |
| AD- | ususccu(Ghd)Afu | 262 | asAfsaaug(Cgn)a | 536 | CUUUCCUGAUCACUA | 810 |
| 392900 | CfAfCfuaugcauuu | | uagugAfuCfaggaa | | UGCAUUUU | |
| | uL96 | | sasg | | | |
| AD- | csusgau(Chd)Afc | 263 | usUfsuaaa(Agn)u | 537 | UCCUGAUCACUAUGC | 811 |
| 392901 | UfAfUfgcauuuuaa | | gcauaGfuGfaucag | | AUUUUAAA | |
| | aL96 | | sgsa | | | |
| AD- | csascgu(Ahd)Ufc | 264 | usCfsaaag(Agn)c | 538 | UCCACGUAUCUUUGG | 812 |
| 392902 | UfUfUfgggucuuug | | ccaaaGfaUfacgug | | GUCUUUGA | |
| | aL96 | | sgsa | | | |
| AD- | usgsggu(Chd)Ufu | 265 | asUfsuuuc(Tgn)u | 539 | UUUGGGUCUUUGAUA | 813 |
| 392903 | UfGfAfuaaagaaaa | | uaucaAfaGfaccca | | AAGAAAAG | |
| | uL96 | | sasa | | | |
| AD- | uscsaau(Uhd)Afc | 266 | usGfsgaga(Agn)u | 540 | CUUCAAUUACCAAGA | 814 |
| 392904 | CfAfAfgaauucucc | | ucuugGfuAfauuga | | AUUCUCCA | |
| | aL96 | | sasg | | | |
| AD- | uscsgcu(Uhd)Ufc | 267 | asUfsaaua(Cgn)a | 541 | GAUCGCUUUCUACAC | 815 |
| 392906 | UfAfCfacuguauua | | guguaGfaAfagcga | | UGUAUUAC | |
| | uL96 | | susc | | | |
| AD- | asusuuu(Chd)Ufu | 268 | usUfscaga(Cgn)u | 542 | CAAUUUUCUUUAACC | 816 |
| 392907 | UfAfAfccagucuga | | gguuaAfaGfaaaau | | AGUCUGAA | |
| | aL96 | | susg | | | |
| AD- | csusuua(Ahd)Cfc | 269 | gsAfsaacu(Tgn)c | 543 | UUCUUUAACCAGUCU | 817 |
| 392908 | AfGfUfcugaaguuu | | agacuGfgUfuaaag | | GAAGUUUC | |
| | cL96 | | sasa | | | |
| AD- | usasaga(Uhd)Gfu | 270 | asCfsaaau(Tgn)g | 544 | UUUAAGAUGUGUCUU | 818 |
| 392909 | GfUfCfuucaauuug | | aagacAfcAfucuua | | CAAUUUGU | |
| | uL96 | | sasa | | | |
| AD- | gsasucc(Uhd)Gfu | 271 | usGfsuagg(Agn)a | 545 | GAGAUCCUGUUAAAC | 819 |
| 392910 | UfAfAfacuuccuac | | guuuaAfcAfggauc | | UUCCUACA | |
| | aL96 | | susc | | | |
| AD- | csusgcu(Uhd)Cfa | 272 | asUfsuuug(Cgn)u | 546 | AGCUGCUUCAGAAAG | 820 |
| 392911 | GfAfAfagagcaaaa | | cuuucUfgAfagcag | | AGCAAAAC | |
| | uL96 | | scsu | | | |
| AD- | csasgaa(Ahd)Gfa | 273 | usGfsaaua(Ggn)u | 547 | UUCAGAAAGAGCAAA | 821 |
| 392912 | GfCfAfaaacuauuc | | uuugcUfcUfuucug | | ACUAUUCA | |
| | aL96 | | sasa | | | |
| AD- | usasuga(Ahd)Gfu | 274 | usUfsuuug(Agn)u | 548 | GAUAUGAAGUUCAUC | 822 |
| 392913 | UfCfAfucaucaaaa | | gaugaAfcUfucaua | | AUCAAAAA | |
| | aL96 | | susc | | | |
| AD- | csasuca(Uhd)Cfa | 275 | asAfsacac(Cgn)a | 549 | UUCAUCAUCAAAAAU | 823 |
| 392914 | AfAfAfauugguguu | | auuuuUfgAfugaug | | UGGUGUUC | |
| | uL96 | | sasa | | | |
| AD- | uscsaaa(Ahd)Afu | 276 | asCfsaaag(Agn)a | 550 | CAUCAAAAAUUGGUG | 824 |
| 392915 | UfGfGfuguucuuug | | caccaAfuUfuuuga | | UUCUUUGC | |
| | uL96 | | susg | | | |
| AD- | asasaau(Chd)Cfa | 277 | asGfsaacu(Tgn)g | 551 | CGAAAAUCCAACCUA | 825 |
| 392916 | AfCfCfuacaaguuc | | uagguUfgGfauuuu | | CAAGUUCU | |
| | uL96 | | scsg | | | |
| AD- | cscsaac(Chd)Ufa | 278 | asUfscaaa(Ggn)a | 552 | AUCCAACCUACAAGU | 826 |
| 392917 | CfAfAfguucuuuga | | acuugUfaGfguugg | | UCUUUGAG | |
| | uL96 | | sasu | | | |
| AD- | ascsuca(Uhd)Ufa | 279 | usGfsucaa(Agn)a | 553 | UUACUCAUUAUCGCC | 827 |
| 392918 | UfCfGfccuuuugac | | ggcgaUfaAfugagu | | UUUUGACA | |
| | aL96 | | sasa | | | |
| AD- | csuscau(Uhd)Afu | 280 | asUfsguca(Agn)a | 554 | UACUCAUUAUCGCCU | 828 |
| 392919 | CfGfCfcuuuugaca | | aggcgAfuAfaugag | | UUUGACAG | |
| | uL96 | | susa | | | |
| AD- | usgsugc(Uhd)Gfu | 281 | asUfscuac(Tgn)u | 555 | GCUGUGCUGUAACAC | 829 |
| 392920 | AfAfCfacaaguaga | | guguuAfcAfgcaca | | AAGUAGAU | |
| | uL96 | | sgsc | | | |
| AD- | gsusgcu(Ghd)Ufa | 282 | asAfsucua(Cgn)u | 556 | CUGUGCUGUAACACA | 830 |
| 392921 | AfCfAfcaaguagau | | uguguUfaCfagcac | | AGUAGAUG | |
| | uL96 | | sasg | | | |
| AD- | uscsuuu(Ahd)Cfa | 283 | asUfsagag(Agn)c | 557 | UCUCUUUACAUUUUG | 831 |
| 392922 | UfUfUfuggucucua | | caaaaUfgUfaaaga | | GUCUCUAU | |
| | uL96 | | sgsa | | | |
| AD- | asusggg(Uhd)Ufu | 284 | usUfsuaca(Ggn)u | 558 | UAAUGGGUUUUGUGU | 832 |
| 392923 | UfGfUfguacuguaa | | acacaAfaAfcccau | | ACUGUAAA | |
| | aL96 | | susa | | | |
| AD- | ususgug(Uhd)Afc | 285 | usAfsaauu(Cgn)u | 559 | UUUUGUGUACUGUAA | 833 |
| 392924 | UfGfUfaaagaauuu | | uuacaGfuAfcacaa | | AGAAUUUA | |
| | aL96 | | sasa | | | |
| AD- | gscsugu(Ahd)Ufc | 286 | asAfsugca(Cgn)u | 560 | UAGCUGUAUCAAACU | 834 |
| 392925 | AfAfAfcuagugcau | | aguuuGfaUfacagc | | AGUGCAUG | |
| | uL96 | | susa | | | |
| AD- | csusagu(Ghd)Cfa | 287 | asAfsgaau(Cgn)u | 561 | AACUAGUGCAUGAAU | 835 |
| 392926 | UfGfAfauagauucu | | auucaUfgCfacuag | | AGAUUCUC | |
| | uL96 | | susu | | | |
| AD- | usasgug(Chd)Afu | 288 | asGfsagaa(Tgn)c | 562 | ACUAGUGCAUGAAUA | 836 |
| 392927 | GfAfAfuagauucuc | | uauucAfuGfcacua | | GAUUCUCU | |
| | uL96 | | sgsu | | | |
| AD- | csuscuc(Chd)Ufg | 289 | usGfsugau(Agn)a | 563 | UUCUCUCCUGAUUAU | 837 |
| 392928 | AfUfUfauuuaucac | | auaauCfaGfgagag | | UUAUCACA | |
| | aL96 | | sasa | | | |
| AD- | cscsuga(Uhd)Ufa | 290 | asCfsuaug(Tgn)g | 564 | CUCCUGAUUAUUUAU | 838 |
| 392929 | UfUfUfaucacauag | | auaaaUfaAfucagg | | CACAUAGC | |
| | uL96 | | sasg | | | |
| AD- | usasagu(Chd)Cfu | 291 | asCfsauau(Ggn)u | 565 | AUUAAGUCCUACUUU | 839 |
| 392930 | AfCfUfuuacauaug | | aaaguAfgGfacuua | | ACAUAUGC | |
| | uL96 | | sasu | | | |
| AD- | asgsucc(Uhd)Afc | 292 | asAfsgcau(Agn)u | 566 | UAAGUCCUACUUUAC | 840 |
| 392931 | UfUfUfacauaugcu | | guaaaGfuAfggacu | | AUAUGCUU | |
| | uL96 | | susa | | | |
| AD- | gsusccu(Ahd)Cfu | 293 | asAfsagca(Tgn)a | 567 | AAGUCCUACUUUACA | 841 |
| 392932 | UfUfAfcauaugcuu | | uguaaAfgUfaggac | | UAUGCUUU | |
| | uL96 | | susu | | | |
| AD- | ususcuc(Uhd)Ufg | 294 | asGfsgaau(Agn)c | 568 | GCUUCUCUUGCCUAA | 842 |
| 392933 | CfCfUfaaguauucc | | uuaggCfaAfgagaa | | GUAUUCCU | |
| | uL96 | | sgsc | | | |
| AD- | csuscuu(Ghd)Cfc | 295 | asAfsagga(Agn)u | 569 | UUCUCUUGCCUAAGU | 843 |
| 392934 | UfAfAfguauuccuu | | acuuaGfgCfaagag | | AUUCCUUU | |
| | uL96 | | sasa | | | |
| AD- | usasuuc(Chd)Ufu | 296 | asUfsagug(Agn)u | 570 | AGUAUUCCUUUCCUG | 844 |
| 392935 | UfCfCfugaucacua | | caggaAfaGfgaaua | | AUCACUAU | |
| | uL96 | | scsu | | | |
| AD- | ususucc(Uhd)Gfa | 297 | asAfsaugc(Agn)u | 571 | CCUUUCCUGAUCACU | 845 |
| 392936 | UfCfAfcuaugcauu | | agugaUfcAfggaaa | | AUGCAUUU | |
| | uL96 | | sgsg | | | |
| AD- | csascua(Uhd)Gfc | 298 | usUfsaacu(Tgn)u | 572 | AUCACUAUGCAUUUU | 846 |
| 392937 | AfUfUfuuaaaguua | | aaaauGfcAfuagug | | AAAGUUAA | |
| | aL96 | | sasu | | | |
| AD- | csusgca(Uhd)Ufu | 299 | asAfsucug(Tgn)a | 573 | GACUGCAUUUUACUG | 847 |
| 392938 | UfAfCfuguacagau | | caguaAfaAfugcag | | UACAGAUU | |
| | uL96 | | susc | | | |
| AD- | ususcug(Chd)Ufa | 300 | usAfsuauc(Agn)c | 574 | GCUUCUGCUAUAUUU | 848 |
| 392939 | UfAfUfuugugauau | | aaauaUfaGfcagaa | | GUGAUAUA | |
| | aL96 | | sgsc | | | |
| AD- | uscsugc(Uhd)Afu | 301 | asUfsauau(Cgn)a | 575 | CUUCUGCUAUAUUUG | 849 |
| 392940 | AfUfUfugugauaua | | caaauAfuAfgcaga | | UGAUAUAG | |
| | uL96 | | sasg | | | |
| AD- | ascsgua(Uhd)Cfu | 302 | asUfscaaa(Ggn)a | 576 | CCACGUAUCUUUGGG | 850 |
| 392941 | UfUfGfggucuuuga | | cccaaAfgAfuacgu | | UCUUUGAU | |
| | uL96 | | sgsg | | | |
| AD- | uscsuuu(Ghd)Gfg | 303 | usCfsuuua(Tgn)c | 577 | UAUCUUUGGGUCUUU | 851 |
| 392942 | UfCfUfuugauaaag | | aaagaCfcCfaaaga | | GAUAAAGA | |
| | aL96 | | susa | | | |
| AD- | csusuug(Ghd)Gfu | 304 | usUfscuuu(Agn)u | 578 | AUCUUUGGGUCUUUG | 852 |
| 392943 | CfUfUfugauaaaga | | caaagAfcCfcaaag | | AUAAAGAA | |
| | aL96 | | sasu | | | |
| AD- | ususggg(Uhd)Cfu | 305 | usUfsuucu(Tgn)u | 579 | CUUUGGGUCUUUGAU | 853 |
| 392944 | UfUfGfauaaagaaa | | aucaaAfgAfcccaa | | AAAGAAAA | |
| | aL96 | | sasg | | | |
| AD- | asgsaau(Chd)Cfc | 306 | asUfsuaca(Agn)u | 580 | AAAGAAUCCCUGUUC | 854 |
| 392945 | UfGfUfucauuguaa | | gaacaGfgGfauucu | | AUUGUAAG | |
| | uL96 | | susu | | | |
| AD- | gsasauc(Chd)Cfu | 307 | asCfsuuac(Agn)a | 581 | AAGAAUCCCUGUUCA | 855 |
| 392946 | GfUfUfcauuguaag | | ugaacAfgGfgauuc | | UUGUAAGC | |
| | uL96 | | susu | | | |
| AD- | gsusuca(Uhd)Ufg | 308 | asUfsaaaa(Ggn)u | 582 | CUGUUCAUUGUAAGC | 856 |
| 392947 | UfAfAfgcacuuuua | | gcuuaCfaAfugaac | | ACUUUUAC | |
| | uL96 | | sasg | | | |
| AD- | ususaug(Ahd)Cfa | 309 | usAfsgaaa(Ggn)c | 583 | GCUUAUGACAUGAUC | 857 |
| 392948 | UfGfAfucgcuuucu | | gaucaUfgUfcauaa | | GCUUUCUA | |
| | aL96 | | sgsc | | | |
| AD- | asusgac(Ahd)Ufg | 310 | usGfsuaga(Agn)a | 584 | UUAUGACAUGAUCGC | 858 |
| 392949 | AfUfCfgcuuucuac | | gcgauCfaUfgucau | | UUUCUACA | |
| | aL96 | | sasa | | | |
| AD- | csasuga(Uhd)Cfg | 311 | asCfsagug(Tgn)a | 585 | GACAUGAUCGCUUUC | 859 |
| 392950 | CfUfUfucuacacug | | gaaagCfgAfucaug | | UACACUGU | |
| | uL96 | | susc | | | |
| AD- | csusuuc(Uhd)Afc | 312 | usAfsugua(Agn)u | 586 | CGCUUUCUACACUGU | 860 |
| 392951 | AfCfUfguauuacau | | acaguGfuAfgaaag | | AUUACAUA | |
| | aL96 | | scsg | | | |
| AD- | gsasuuc(Ahd)Afu | 313 | asUfsgguu(Agn)a | 587 | CAGAUUCAAUUUUCU | 861 |
| 392952 | UfUfUfcuuuaacca | | agaaaAfuUfgaauc | | UUAACCAG | |
| | uL96 | | susg | | | |
| AD- | ususucu(Uhd)Ufa | 314 | asCfsuuca(Ggn)a | 588 | AUUUUCUUUAACCAG | 862 |
| 392953 | AfCfCfagucugaag | | cugguUfaAfagaaa | | UCUGAAGU | |
| | uL96 | | sasu | | | |
| AD- | ususuaa(Ghd)Afu | 315 | asAfsauug(Agn)a | 589 | CUUUUAAGAUGUGUC | 863 |
| 392954 | GfUfGfucuucaauu | | gacacAfuCfuuaaa | | UUCAAUUU | |
| | uL96 | | sasg | | | |
| AD- | ususaag(Ahd)Ufg | 316 | csAfsaauu(Ggn)a | 590 | UUUUAAGAUGUGUCU | 864 |
| 392955 | UfGfUfcuucaauuu | | agacaCfaUfcuuaa | | UCAAUUUG | |
| | gL96 | | sasa | | | |
| AD- | asgsaug(Uhd)Gfu | 317 | asUfsacaa(Agn)u | 591 | UAAGAUGUGUCUUCA | 865 |
| 392956 | CfUfUfcaauuugua | | ugaagAfcAfcaucu | | AUUUGUAU | |
| | uL96 | | susa | | | |
| AD- | usgsucu(Uhd)Cfa | 318 | asUfsuuua(Tgn)a | 592 | UGUGUCUUCAAUUUG | 866 |
| 392957 | AfUfUfuguauaaaa | | caaauUfgAfagaca | | UAUAAAAU | |
| | uL96 | | scsa | | | |
| AD- | csusuca(Ahd)Ufu | 319 | asCfscauu(Tgn)u | 593 | GUCUUCAAUUUGUAU | 867 |
| 392958 | UfGfUfauaaaaugg | | auacaAfaUfugaag | | AAAAUGGU | |
| | uL96 | | sasc | | | |
| AD- | asusggu(Ghd)Ufu | 320 | usUfsauuu(Agn)c | 594 | AAAUGGUGUUUUCAU | 868 |
| 392959 | UfUfCfauguaaaua | | augaaAfaCfaccau | | GUAAAUAA | |
| | aL96 | | susu | | | |
| AD- | ususcuu(Uhd)Ufa | 321 | usGfsaaga(Cgn)a | 595 | CCUUCUUUUAAGAUG | 869 |
| 392960 | AfGfAfugugucuuc | | caucuUfaAfaagaa | | UGUCUUCA | |
| | aL96 | | sgsg | | | |
| AD- | usgsuau(Uhd)Cfu | 322 | usGfsuaaa(Ggn)a | 596 | AAUGUAUUCUAUCUC | 870 |
| 392961 | AfUfCfucucuuuac | | gagauAfgAfauaca | | UCUUUACA | |
| | aL96 | | susu | | | |
| AD- | gsuscuc(Uhd)Afu | 323 | usUfsaaua(Agn)u | 597 | UGGUCUCUAUACUAC | 871 |
| 392962 | AfCfUfacauuauua | | guaguAfuAfgagac | | AUUAUUAA | |
| | aL96 | | scsa | | | |
| AD- | uscsucu(Ahd)Ufa | 324 | asUfsuaau(Agn)a | 598 | GGUCUCUAUACUACA | 872 |
| 392963 | CfUfAfcauuauuaa | | uguagUfaUfagaga | | UUAUUAAU | |
| | uL96 | | scsc | | | |
| AD- | csuscua(Uhd)Afc | 325 | asAfsuuaa(Tgn)a | 599 | GUCUCUAUACUACAU | 873 |
| 392964 | UfAfCfauuauuaau | | auguaGfuAfuagag | | UAUUAAUG | |
| | uL96 | | sasc | | | |
| AD- | csusuca(Ahd)Ufu | 326 | asAfsgaau(Tgn)c | 600 | GUCUUCAAUUACCAA | 874 |
| 392965 | AfCfCfaagaauucu | | uugguAfaUfugaag | | GAAUUCUC | |
| | uL96 | | sasc | | | |
| AD- | cscsaca(Chd)Afu | 327 | asAfsauac(Agn)u | 601 | AUCCACACAUCAGUA | 875 |
| 392966 | CfAfGfuaauguauu | | uacugAfuGfugugg | | AUGUAUUC | |
| | uL96 | | sasu | | | |
| AD- | csusauc(Uhd)Cfu | 328 | asCfsaaaa(Tgn)g | 602 | UUCUAUCUCUCUUUA | 876 |
| 392967 | CfUfUfuacauuuug | | uaaagAfgAfgauag | | CAUUUUGG | |
| | uL96 | | sasa | | | |
| AD- | gsgsucu(Chd)Ufa | 329 | usAfsauaa(Tgn)g | 603 | UUGGUCUCUAUACUA | 877 |
| 392968 | UfAfCfuacauuauu | | uaguaUfaGfagacc | | CAUUAUUA | |
| | aL96 | | sasa | | | |
| AD- | uscsuau(Ahd)Cfu | 330 | asCfsauua(Agn)u | 604 | UCUCUAUACUACAUU | 878 |
| 392969 | AfCfAfuuauuaaug | | aauguAfgUfauaga | | AUUAAUGG | |
| | uL96 | | sgsa | | | |
| AD- | gsgsucu(Uhd)Cfa | 331 | asAfsuucu(Tgn)g | 605 | CUGGUCUUCAAUUAC | 879 |
| 392970 | AfUfUfaccaagaau | | guaauUfgAfagacc | | CAAGAAUU | |
| | uL96 | | sasg | | | |
| AD- | csasgga(Uhd)Afu | 332 | asAfsugau(Ggn)a | 606 | CUCAGGAUAUGAAGU | 880 |
| 392971 | GfAfAfguucaucau | | acuucAfuAfuccug | | UCAUCAUC | |
| | uL96 | | sasg | | | |
| AD- | ascsaca(Uhd)Cfa | 333 | usAfsgaau(Agn)c | 607 | CCACACAUCAGUAAU | 881 |
| 392972 | GfUfAfauguauucu | | auuacUfgAfugugu | | GUAUUCUA | |
| | aL96 | | sgsg | | | |
| AD- | csusaua(Chd)Ufa | 334 | asCfscauu(Agn)a | 608 | CUCUAUACUACAUUA | 882 |
| 392973 | CfAfUfuauuaaugg | | uaaugUfaGfuauag | | UUAAUGGG | |
| | uL96 | | sasg | | | |
| AD- | cscscgu(Uhd)Ufu | 335 | asUfsgagu(Agn)a | 609 | AACCCGUUUUAUGAU | 883 |
| 392974 | AfUfGfauuuacuca | | aucauAfaAfacggg | | UUACUCAU | |
| | uL96 | | susu | | | |
| AD- | ususcca(Uhd)Gfa | 336 | asAfsguaa(Agn)a | 610 | UUUUCCAUGACUGCA | 884 |
| 392975 | CfUfGfcauuuuacu | | ugcagUfcAfuggaa | | UUUUACUG | |
| | uL96 | | sasa | | | |
| AD- | uscsuuc(Ahd)Afu | 337 | asGfsaauu(Cgn)u | 611 | GGUCUUCAAUUACCA | 885 |
| 392976 | UfAfCfcaagaauuc | | ugguaAfuUfgaaga | | AGAAUUCU | |
| | uL96 | | scsc | | | |
| AD- | csusgaa(Ghd)Ufu | 338 | asUfsauca(Tgn)a | 612 | GUCUGAAGUUUCAUU | 886 |
| 392977 | UfCfAfuuuaugaua | | aaugaAfaCfuucag | | UAUGAUAC | |
| | uL96 | | sasc | | | |

TABLE 3
Exemplary Human APP-Targeting RNAi Agent Modified Duplexes, No “L96” Linker

| | Sense | SEQ | Antisense | SEQ | | SEQ |
|---|---|---|---|---|---|---|
| Duplex | Sequence | ID | Sequence | ID | mRNA target | ID |
| Name | (5′ to 3′) | NO | (5′ to 3′) | NO | sequence | NO |
| AD- | gsasccc(Ahd)Afu | 65 | asAfsagua(Ggn)g | 339 | GUGACCCAAUUAAGU | 613 |
| 392699 | UfAfAfguccuacuu | | acuuaAfuUfggguc | | CCUACUUU | |
| | u | | sasc | | | |
| AD- | uscsucc(Uhd)Gfa | 66 | asUfsguga(Tgn)a | 340 | UCUCUCCUGAUUAUU | 614 |
| 392700 | UfUfAfuuuaucaca | | aauaaUfcAfggaga | | UAUCACAU | |
| | u | | sgsa | | | |
| AD- | cscsuga(Ahd)Cfu | 67 | asUfsggau(Tgn)a | 341 | UGCCUGAACUUGAAU | 615 |
| 392703 | UfGfAfauuaaucca | | auucaAfgUfucagg | | UAAUCCAC | |
| | u | | scsa | | | |
| AD- | gsgsuuc(Ahd)Afa | 68 | asAfsuugc(Agn)c | 342 | UGGGUUCAAACAAAG | 616 |
| 392704 | CfAfAfaggugcaau | | cuuugUfuUfgaacc | | GUGCAAUC | |
| | u | | scsa | | | |
| AD- | ususuac(Uhd)Cfa | 69 | csAfsaaag(Ggn)c | 343 | GAUUUACUCAUUAUC | 617 |
| 392705 | UfUfAfucgccuuuu | | gauaaUfgAfguaaa | | GCCUUUUG | |
| | g | | susc | | | |
| AD- | asusuua(Ghd)Cfu | 70 | asCfsuagu(Tgn)u | 344 | GAAUUUAGCUGUAUC | 618 |
| 392707 | GfUfAfucaaacuag | | gauacAfgCfuaaau | | AAACUAGU | |
| | u | | susc | | | |
| AD- | asgsuau(Uhd)Cfc | 71 | asGfsugau(Cgn)a | 345 | UAAGUAUUCCUUUCC | 619 |
| 392708 | UfUfUfccugaucac | | ggaaaGfgAfauacu | | UGAUCACU | |
| | u | | susa | | | |
| AD- | gscsuua(Uhd)Gfa | 72 | gsAfsaagc(Ggn)a | 346 | UUGCUUAUGACAUGA | 620 |
| 392709 | CfAfUfgaucgcuuu | | ucaugUfcAfuaagc | | UCGCUUUC | |
| | c | | sasa | | | |
| AD- | asasgau(Ghd)Ufg | 73 | usAfscaaa(Tgn)u | 347 | UUAAGAUGUGUCUUC | 621 |
| 392710 | UfCfUfucaauuugu | | gaagaCfaCfaucuu | | AAUUUGUA | |
| | a | | sasa | | | |
| AD- | gscsaaa(Ahd)Cfc | 74 | asUfsagug(Agn)a | 348 | CAGCAAAACCAUUGC | 622 |
| 392711 | AfUfUfgcuucacua | | gcaauGfgUfuuugc | | UUCACUAC | |
| | u | | susg | | | |
| AD- | asusuua(Chd)Ufc | 75 | asAfsaagg(Cgn)g | 349 | UGAUUUACUCAUUAU | 623 |
| 392712 | AfUfUfaucgccuuu | | auaauGfaGfuaaau | | CGCCUUUU | |
| | u | | scsa | | | |
| AD- | usascuc(Ahd)Ufu | 76 | asUfscaaa(Agn)g | 350 | UUUACUCAUUAUCGC | 624 |
| 392713 | AfUfCfgccuuuuga | | gcgauAfaUfgagua | | CUUUUGAC | |
| | u | | sasa | | | |
| AD. | usgsccu(Ghd)Afa | 77 | asGfsauua(Agn)u | 351 | GAUGCCUGAACUUGA | 625 |
| 392714 | CfUfUfgaauuaauc | | ucaagUfuCfaggca | | AUUAAUCC | |
| | u | | susc | | | |
| AD- | csusgaa(Chd)Ufu | 78 | usGfsugga(Tgn)u | 352 | GCCUGAACUUGAAUU | 626 |
| 392715 | GfAfAfuuaauccac | | aauucAfaGfuucag | | AAUCCACA | |
| | a | | sgsc | | | |
| AD- | ususuag(Chd)Ufg | 79 | asAfscuag(Tgn)u | 353 | AAUUUAGCUGUAUCA | 627 |
| 392716 | UfAfUfcaaacuagu | | ugauaCfaGfcuaaa | | AACUAGUG | |
| | u | | susu | | | |
| AD- | gsasaua(Ghd)Afu | 80 | usAfsauca(Ggn)g | 354 | AUGAAUAGAUUCUCU | 628 |
| 392717 | UfCfUfcuccugauu | | agagaAfuCfuauuc | | CCUGAUUA | |
| | a | | sasu | | | |
| AD | uscscug(Ahd)Ufu | 81 | asUfsaugu(Ggn)a | 355 | UCUCCUGAUUAUUUA | 629 |
| 392718 | AfUfUfuaucacaua | | uaaauAfaUfcagga | | UCACAUAG | |
| | u | | sgsa | | | |
| AD- | cscscaa(Uhd)Ufa | 82 | asUfsaaag(Tgn)a | 356 | GACCCAAUUAAGUCC | 630 |
| 392719 | AfGfUfccuacuuua | | ggacuUfaAfuuggg | | UACUUUAC | |
| | u | | susc | | | |
| AD- | csasuau(Ghd)Cfu | 83 | asAfsucga(Tgn)u | 357 | UACAUAUGCUUUAAG | 631 |
| 392720 | UfUfAfagaaucgau | | cuuaaAfgCfauaug | | AAUCGAUG | |
| | u | | susa | | | |
| AD- | csusucu(Chd)Ufu | 84 | asGfsaaua(Cgn)u | 358 | UGCUUCUCUUGCCUA | 632 |
| 392721 | GfCfCfuaaguauuc | | uaggcAfaGfagaag | | AGUAUUCC | |
| | u | | scsa | | | |
| AD- | csasuug(Chd)Ufu | 85 | asCfsgauc(Agn)u | 359 | AUCAUUGCUUAUGAC | 633 |
| 392722 | AfUfGfacaugaucg | | gucauAfaGfcaaug | | AUGAUCGC | |
| | u | | sasu | | | |
| AD | csusuau(Ghd)Afc | 86 | asGfsaaag(Cgn)g | 360 | UGCUUAUGACAUGAU | 634 |
| 392723 | AfUfGfaucgcuuuc | | aucauGfuCfauaag | | CGCUUUCU | |
| | u | | scsa | | | |
| AD- | usasuga(Chd)Afu | 87 | asUfsagaa(Agn)g | 361 | CUUAUGACAUGAUCG | 635 |
| 392724 | GfAfUfcgcuuucua | | cgaucAfuGfucaua | | CUUUCUAC | |
| | u | | sasg | | | |
| AD | usgsaca(Uhd)Gfa | 88 | asUfsguag(Agn)a | 362 | UAUGACAUGAUCGCU | 636 |
| 392725 | UfCfGfcuuucuaca | | agcgaUfcAfuguca | | UUCUACAC | |
| | u | | susa | | | |
| AD- | gsasucg(Chd)Ufu | 89 | asAfsuaca(Ggn)u | 363 | AUGAUCGCUUUCUAC | 637 |
| 392726 | UfCfUfacacuguau | | guagaAfaGfcgauc | | ACUGUAUU | |
| | u | | sasu | | | |
| AD- | asasaac(Uhd)Afu | 90 | asGfsacgu(Cgn)a | 364 | GCAAAACUAUUCAGA | 638 |
| 392727 | UfCfAfgaugacguc | | ucugaAfuAfguuuu | | UGACGUCU | |
| | u | | sgsc | | | |
| AD | asasacu(Ahd)Ufu | 91 | asAfsgacg(Tgn)c | 365 | CAAAACUAUUCAGAU | 639 |
| 392728 | CfAfGfaugacgucu | | aucugAfaUfaguuu | | GACGUCUU | |
| | u | | susg | | | |
| AD- | ascsgaa(Ahd)Afu | 92 | asCfsuugu(Agn)g | 366 | CUACGAAAAUCCAAC | 640 |
| 392729 | CfCfAfaccuacaag | | guuggAfuUfuucgu | | CUACAAGU | |
| | u | | sasg | | | |
| AD- | usgscuu(Chd)Ufc | 93 | asAfsuacu(Tgn)a | 367 | GCUGCUUCUCUUGCC | 641 |
| 392730 | UfUfGfccuaaguau | | ggcaaGfaGfaagca | | UAAGUAUU | |
| | u | | sgsc | | | |
| AD- | usgscuu(Ahd)Ufg | 94 | asAfsagcg(Agn)u | 368 | AUUGCUUAUGACAUG | 642 |
| 392731 | AfCfAfugaucgcuu | | cauguCfaUfaagca | | AUCGCUUU | |
| | u | | sasu | | | |
| AD- | usgsauc(Ghd)Cfu | 95 | asUfsacag(Tgn)g | 369 | CAUGAUCGCUUUCUA | 643 |
| 392732 | UfUfCfuacacugua | | uagaaAfgCfgauca | | CACUGUAU | |
| | u | | susg | | | |
| AD- | asuscgc(Uhd)Ufu | 96 | usAfsauac(Agn)g | 370 | UGAUCGCUUUCUACA | 644 |
| 392733 | CfUfAfcacuguauu | | uguagAfaAfgcgau | | CUGUAUUA | |
| | a | | scsa | | | |
| AD- | uscsuuu(Ghd)Afc | 97 | asGfsuuuu(Cgn)g | 371 | CAUCUUUGACCGAAA | 645 |
| 392734 | CfGfAfaacgaaaac | | uuucgGfuCfaaaga | | CGAAAACC | |
| | u | | susg | | | |
| AD- | gsusucu(Ghd)Gfg | 98 | usGfsauau(Tgn)u | 372 | AGGUUCUGGGUUGAC | 646 |
| 392735 | UfUfGfacaaauauc | | gucaaCfcCfagaac | | AAAUAUCA | |
| | a | | scsu | | | |
| AD- | usgsggu(Uhd)Gfa | 99 | asUfscuug(Agn)u | 373 | UCUGGGUUGACAAAU | 647 |
| 392736 | CfAfAfauaucaaga | | auuugUfcAfaccca | | AUCAAGAC | |
| | u | | sgsa | | | |
| AD- | gsasuuu(Ahd)Cfu | 100 | asAfsaggc(Ggn)a | 374 | AUGAUUUACUCAUUA | 648 |
| 392737 | CfAfUfuaucgccuu | | uaaugAfgUfaaauc | | UCGCCUUU | |
| | u | | sasu | | | |
| AD- | uscscuu(Uhd)Cfc | 101 | usGfscaua(Ggn)u | 375 | AUUCCUUUCCUGAUC | 649 |
| 392738 | UfGfAfucacuaugc | | gaucaGfgAfaagga | | ACUAUGCA | |
| | a | | sasu | | | |
| AD- | csusuuc(Chd)Ufg | 102 | asAfsugca(Tgn)a | 376 | UCCUUUCCUGAUCAC | 650 |
| 392739 | AfUfCfacuaugcau | | gugauCfaGfgaaag | | UAUGCAUU | |
| | u | | sgsa | | | |
| AD- | asusugc(Uhd)Ufa | 103 | asGfscgau(Cgn)a | 377 | UCAUUGCUUAUGACA | 651 |
| 392740 | UfGfAfcaugaucgc | | ugucaUfaAfgcaau | | UGAUCGCU | |
| | u | | sgsa | | | |
| AD- | uscsuuu(Ahd)Afc | 104 | asAfsacuu(Cgn)a | 378 | UUUCUUUAACCAGUC | 652 |
| 392741 | CfAfGfucugaaguu | | gacugGfuUfaaaga | | UGAAGUUU | |
| | u | | sasa | | | |
| AD- | gsgsauc(Ahd)Gfu | 105 | asAfsucgu(Tgn)u | 379 | AAGGAUCAGUUACGG | 653 |
| 392742 | UfAfCfggaaacgau | | ccguaAfcUfgaucc | | AAACGAUG | |
| | u | | susu | | | |
| AD- | csusggg(Uhd)Ufg | 106 | usCfsuuga(Tgn)a | 380 | UUCUGGGUUGACAAA | 654 |
| 392743 | AfCfAfaauaucaag | | uuuguCfaAfcccag | | UAUCAAGA | |
| | a | | sasa | | | |
| AD- | asusgau(Uhd)Ufa | 107 | asGfsgcga(Tgn)a | 381 | UUAUGAUUUACUCAU | 655 |
| 392744 | CfUfCfauuaucgcc | | augagUfaAfaucau | | UAUCGCCU | |
| | u | | sasa | | | |
| AD- | csusugu(Ghd)Gfu | 108 | asAfsuugg(Ggn)u | 382 | UUCUUGUGGUUUGUG | 656 |
| 392745 | UfUfGfugacccaau | | cacaaAfcCfacaag | | ACCCAAUU | |
| | u | | sasa | | | |
| AD- | asusaug(Chd)Ufu | 109 | asCfsaucg(Agn)u | 383 | ACAUAUGCUUUAAGA | 657 |
| 392746 | UfAfAfgaaucgaug | | ucuuaAfaGfcauau | | AUCGAUGG | |
| | u | | sgsu | | | |
| AD- | ususugu(Chd)Cfa | 110 | asCfsccaa(Agn)g | 384 | UUUUUGUCCACGUAU | 658 |
| 392747 | CfGfUfaucuuuggg | | auacgUfgGfacaaa | | CUUUGGGU | |
| | u | | sasa | | | |
| AD- | uscsauu(Ghd)Ufa | 111 | asCfsguaa(Agn)a | 385 | GUUCAUUGUAAGCAC | 659 |
| 392748 | AfGfCfacuuuuacg | | gugcuUfaCfaauga | | UUUUACGG | |
| | u | | sasc | | | |
| AD- | gsgscca(Ahd)Cfa | 112 | asGfsuuca(Cgn)u | 386 | UUGGCCAACAUGAUU | 660 |
| 392749 | UfGfAfuuagugaac | | aaucaUfgUfuggcc | | AGUGAACC | |
| | u | | sasa | | | |
| AD- | gsasuca(Ghd)Ufu | 113 | asCfsaucg(Tgn)u | 387 | AGGAUCAGUUACGGA | 661 |
| 392750 | AfCfGfgaaacgaug | | uccguAfaCfugauc | | AACGAUGC | |
| | u | | scsu | | | |
| AD. | usascgg(Ahd)Afa | 114 | asAfsugag(Agn)g | 388 | GUUACGGAAACGAUG | 662 |
| 392751 | CfGfAfugcucucau | | caucgUfuUfccgua | | CUCUCAUG | |
| | u | | sasc | | | |
| AD | usgsauu(Uhd)Afc | 115 | asAfsggcg(Agn)u | 389 | UAUGAUUUACUCAUU | 663 |
| 392752 | UfCfAfuuaucgccu | | aaugaGfuAfaauca | | AUCGCCUU | |
| | u | | susa | | | |
| AD- | gsusaga(Uhd)Gfc | 116 | asAfsuuca(Agn)g | 390 | AAGUAGAUGCCUGAA | 664 |
| 392753 | CfUfGfaacuugaau | | uucagGfcAfucuac | | CUUGAAUU | |
| | u | | susu | | | |
| AD- | ususgua(Uhd)Afu | 117 | asAfsccac(Agn)a | 391 | AGUUGUAUAUUAUUC | 665 |
| 392754 | UfAfUfucuuguggu | | gaauaAfuAfuacaa | | UUGUGGUU | |
| | u | | scsu | | | |
| AD- | asusugc(Uhd)Gfc | 118 | asAfsauau(Agn)g | 392 | AGAUUGCUGCUUCUG | 666 |
| 392755 | UfUfCfugcuauauu | | cagaaGfcAfgcaau | | CUAUAUUU | |
| | u | | scsu | | | |
| AD- | usgscua(Uhd)Afu | 119 | usCfscuau(Agn)u | 393 | UCUGCUAUAUUUGUG | 667 |
| 392756 | UfUfGfugauauagg | | cacaaAfuAfuagca | | AUAUAGGA | |
| | a | | sgsa | | | |
| AD- | ascsaca(Uhd)Ufa | 120 | asAfsgucu(Cgn)a | 394 | GCACACAUUAGGCAU | 668 |
| 392757 | GfGfCfauugagacu | | augccUfaAfugugu | | UGAGACUU | |
| | u | | sgsc | | | |
| AD- | asasgaa(Uhd)Cfc | 121 | usUfsacaa(Tgn)g | 395 | AAAAGAAUCCCUGUU | 669 |
| 392758 | CfUfGfuucauugua | | aacagGfgAfuucuu | | CAUUGUAA | |
| | a | | susu | | | |
| AD | csasuug(Uhd)Afa | 122 | asCfscgua(Agn)a | 396 | UUCAUUGUAAGCACU | 670 |
| 392759 | GfCfAfcuuuuacgg | | agugcUfuAfcaaug | | UUUACGGG | |
| | u | | sasa | | | |
| AD- | ususgcu(Uhd)Afu | 123 | asAfsgcga(Tgn)c | 397 | CAUUGCUUAUGACAU | 671 |
| 392760 | GfAfCfaugaucgcu | | augucAfuAfagcaa | | GAUCGCUU | |
| | u | | susg | | | |
| AD | csasagg(Ahd)Ufc | 124 | asGfsuuuc(Cgn)g | 398 | ACCAAGGAUCAGUUA | 672 |
| 392761 | AfGfUfuacggaaac | | uaacuGfaUfccuug | | CGGAAACG | |
| | u | | sgsu | | | |
| AD. | asgsguu(Chd)Ufg | 125 | asUfsauuu(Ggn)u | 399 | CCAGGUUCUGGGUUG | 673 |
| 392762 | GfGfUfugacaaaua | | caaccCfaGfaaccu | | ACAAAUAU | |
| | u | | sgsg | | | |
| AD- | asasgau(Ghd)Ufg | 126 | asUfsuugu(Tgn)u | 400 | AGAAGAUGUGGGUUC | 674 |
| 392763 | GfGfUfucaaacaaa | | gaaccCfaCfaucuu | | AAACAAAG | |
| | u | | scsu | | | |
| AD- | csusgaa(Ghd)Afa | 127 | usGfsugua(Cgn)u | 401 | UGCUGAAGAAGAAAC | 675 |
| 392764 | GfAfAfacaguacac | | guuucUfuCfuucag | | AGUACACA | |
| | a | | scsa | | | |
| AD- | asasguu(Ghd)Gfa | 128 | asAfsuggu(Tgn)u | 402 | UGAAGUUGGACAGCA | 676 |
| 392765 | CfAfGfcaaaaccau | | ugcugUfcCfaacuu | | AAACCAUU | |
| | u | | scsa | | | |
| AD- | asuscgg(Uhd)Gfu | 129 | asUfsucua(Tgn)a | 403 | CCAUCGGUGUCCAUU | 677 |
| 392766 | CfCfAfuuuauagaa | | aauggAfcAfccgau | | UAUAGAAU | |
| | u | | sgsg | | | |
| AD- | uscsggu(Ghd)Ufc | 130 | usAfsuucu(Agn)u | 404 | CAUCGGUGUCCAUUU | 678 |
| 392767 | CfAfUfuuauagaau | | aaaugGfaCfaccga | | AUAGAAUA | |
| | a | | susg | | | |
| AD- | gscsugu(Ahd)Afc | 131 | asGfscauc(Tgn)a | 405 | GUGCUGUAACACAAG | 679 |
| 392768 | AfCfAfaguagaugc | | cuuguGfuUfacagc | | UAGAUGCC | |
| | u | | sasc | | | |
| AD- | asasgua(Ghd)Afu | 132 | usUfscaag(Tgn)u | 406 | ACAAGUAGAUGCCUG | 680 |
| 392769 | GfCfCfugaacuuga | | caggcAfuCfuacuu | | AACUUGAA | |
| | a | | sgsu | | | |
| AD- | ususgug(Ghd)Ufu | 133 | usAfsauug(Ggn)g | 407 | UCUUGUGGUUUGUGA | 681 |
| 392770 | UfGfUfgacccaauu | | ucacaAfaCfcacaa | | CCCAAUUA | |
| | a | | sgsa | | | |
| AD | gsusuug(Uhd)Gfa | 134 | asGfsacuu(Agn)a | 408 | UGGUUUGUGACCCAA | 682 |
| 392771 | CfCfCfaauuaaguc | | uugggUfcAfcaaac | | UUAAGUCC | |
| | u | | scsa | | | |
| AD- | gsusgac(Chd)Cfa | 135 | asGfsuagg(Agn)c | 409 | UUGUGACCCAAUUAA | 683 |
| 392772 | AfUfUfaaguccuac | | uuaauUfgGfgucac | | GUCCUACU | |
| | u | | sasa | | | |
| AD- | usasugc(Uhd)Ufu | 136 | asCfscauc(Ggn)a | 410 | CAUAUGCUUUAAGAA | 684 |
| 392773 | AfAfGfaaucgaugg | | uucuuAfaAfgcaua | | UCGAUGGG | |
| | u | | susg | | | |
| AD- | ususugu(Ghd)Afu | 137 | usCfsuuaa(Tgn)u | 411 | UAUUUGUGAUAUAGG | 685 |
| 392774 | AfUfAfggaauuaag | | ccuauAfuCfacaaa | | AAUUAAGA | |
| | a | | susa | | | |
| AD- | asasaga(Ahd)Ufc | 138 | usAfscaau(Ggn)a | 412 | GAAAAGAAUCCCUGU | 686 |
| 392775 | CfCfUfguucauugu | | acaggGfaUfucuuu | | UCAUUGUA | |
| | a | | susc | | | |
| AD- | usgsauu(Ghd)Ufa | 139 | asGfscaau(Ggn)a | 413 | GAUGAUUGUACAGAA | 687 |
| 392776 | CfAfGfaaucauugc | | uucugUfaCfaauca | | UCAUUGCU | |
| | u | | susc | | | |
| AD- | usgsccu(Ghd)Gfa | 140 | asAfsagaa(Ggn)g | 414 | CAUGCCUGGACAAAC | 688 |
| 392777 | CfAfAfacccuucuu | | guuugUfcCfaggca | | CCUUCUUU | |
| | u | | susg | | | |
| AD- | gsasgca(Ahd)Afa | 141 | asUfscauc(Tgn)g | 415 | AAGAGCAAAACUAUU | 689 |
| 392778 | CfUfAfuucagauga | | aauagUfuUfugcuc | | CAGAUGAC | |
| | u | | susu | | | |
| AD- | asgsuga(Ahd)Cfc | 142 | asUfsaacu(Ggn)a | 416 | UUAGUGAACCAAGGA | 690 |
| 392779 | AfAfGfgaucaguua | | uccuuGfgUfucacu | | UCAGUUAC | |
| | u | | sasa | | | |
| AD- | usgsaac(Chd)Afa | 143 | asCfsguaa(Cgn)u | 417 | AGUGAACCAAGGAUC | 691 |
| 392780 | GfGfAfucaguuacg | | gauccUfuGfguuca | | AGUUACGG | |
| | u | | scsu | | | |
| AD- | csasguu(Ahd)Cfg | 144 | asGfsagca(Tgn)c | 418 | AUCAGUUACGGAAAC | 692 |
| 392781 | GfAfAfacgaugcuc | | guuucCfgUfaacug | | GAUGCUCU | |
| | u | | sasu | | | |
| AD- | asgsaag(Ahd)Ufg | 145 | usUfsguuu(Ggn)a | 419 | GCAGAAGAUGUGGGU | 693 |
| 392782 | UfGfGfguucaaaca | | acccaCfaUfcuucu | | UCAAACAA | |
| | a | | sgsc | | | |
| AD- | cscsucu(Ghd)Afa | 146 | usUfsugcu(Ggn)u | 420 | AGCCUCUGAAGUUGG | 694 |
| 392783 | GfUfUfggacagcaa | | ccaacUfuCfagagg | | ACAGCAAA | |
| | a | | scsu | | | |
| AD- | ususaug(Ahd)Ufu | 147 | asCfsgaua(Agn)u | 421 | UUUUAUGAUUUACUC | 695 |
| 392784 | UfAfCfucauuaucg | | gaguaAfaUfcauaa | | AUUAUCGC | |
| | u | | sasa | | | |
| AD- | ascsagc(Uhd)Gfu | 148 | asUfsugug(Tgn)u | 422 | UGACAGCUGUGCUGU | 696 |
| 392785 | GfCfUfguaacacaa | | acagcAfcAfgcugu | | AACACAAG | |
| | u | | scsa | | | |
| AD- | usgsuga(Chd)Cfc | 149 | asUfsagga(Cgn)u | 423 | UUUGUGACCCAAUUA | 697 |
| 392786 | AfAfUfuaaguccua | | uaauuGfgGfucaca | | AGUCCUAC | |
| | u | | sasa | | | |
| AD- | usascau(Ahd)Ufg | 150 | usCfsgauu(Cgn)u | 424 | UUUACAUAUGCUUUA | 698 |
| 392787 | CfUfUfuaagaaucg | | uaaagCfaUfaugua | | AGAAUCGA | |
| | a | | sasa | | | |
| AD- | gsusaaa(Uhd)Afa | 151 | usCfscaag(Agn)a | 425 | AUGUAAAUAAAUACA | 699 |
| 392788 | AfUfAfcauucuugg | | uguauUfuAfuuuac | | UUCUUGGA | |
| | a | | sasu | | | |
| AD- | uscsagu(Uhd)Afc | 152 | asAfsgcau(Cgn)g | 426 | GAUCAGUUACGGAAA | 700 |
| 392789 | GfGfAfaacgaugcu | | uuuccGfuAfacuga | | CGAUGCUC | |
| | u | | susc | | | |
| AD- | csusucc(Chd)Gfu | 153 | asAfsacuc(Tgn)c | 427 | UCCUUCCCGUGAAUG | 701 |
| 392790 | GfAfAfuggagaguu | | cauucAfcGfggaag | | GAGAGUUC | |
| | u | | sgsa | | | |
| AD- | asgsuug(Ghd)Afc | 154 | asAfsaugg(Tgn)u | 428 | GAAGUUGGACAGCAA | 702 |
| 392791 | AfGfCfaaaaccauu | | uugcuGfuCfcaacu | | AACCAUUG | |
| | u | | susc | | | |
| AD- | cscscau(Chd)Gfg | 155 | asUfsauaa(Agn)u | 429 | UACCCAUCGGUGUCC | 703 |
| 392792 | UfGfUfccauuuaua | | ggacaCfcGfauggg | | AUUUAUAG | |
| | u | | susa | | | |
| AD- | usgscac(Ahd)Cfa | 156 | usCfsucaa(Tgn)g | 430 | UGUGCACACAUUAGG | 704 |
| 392793 | UfUfAfggcauugag | | ccuaaUfgUfgugca | | CAUUGAGA | |
| | a | | scsa | | | |
| AD- | cscsaac(Ahd)Ufg | 157 | usUfsgguu(Cgn)a | 431 | GGCCAACAUGAUUAG | 705 |
| 392794 | AfUfUfagugaacca | | cuaauCfaUfguugg | | UGAACCAA | |
| | a | | scsc | | | |
| AD- | asusgau(Uhd)Afg | 158 | asAfsuccu(Tgn)g | 432 | ACAUGAUUAGUGAAC | 706 |
| 392795 | UfGfAfaccaaggau | | guucaCfuAfaucau | | CAAGGAUC | |
| | u | | sgsu | | | |
| AD- | ususagu(Ghd)Afa | 159 | asAfscuga(Tgn)c | 433 | GAUUAGUGAACCAAG | 707 |
| 392796 | CfCfAfaggaucagu | | cuuggUfuCfacuaa | | GAUCAGUU | |
| | u | | susc | | | |
| AD- | asascca(Ahd)Gfg | 160 | usUfsccgu(Agn)a | 434 | UGAACCAAGGAUCAG | 708 |
| 392797 | AfUfCfaguuacgga | | cugauCfcUfugguu | | UUACGGAA | |
| | a | | scsa | | | |
| AD- | gsusuac(Ghd)Gfa | 161 | usGfsagag(Cgn)a | 435 | CAGUUACGGAAACGA | 709 |
| 392798 | AfAfCfgaugcucuc | | ucguuUfcCfguaac | | UGCUCUCA | |
| | a | | susg | | | |
| AD- | gsasugc(Ahd)Gfa | 162 | asUfscaug(Tgn)c | 436 | UGGAUGCAGAAUUCC | 710 |
| 392799 | AfUfUfccgacauga | | ggaauUfcUfgcauc | | GACAUGAC | |
| | u | | scsa | | | |
| AD- | ususgga(Chd)Afg | 163 | asGfscaau(Ggn)g | 437 | AGUUGGACAGCAAAA | 711 |
| 392800 | CfAfAfaaccauugc | | uuuugCfuGfuccaa | | CCAUUGCU | |
| | u | | scsu | | | |
| AD- | asasacc(Ahd)Ufu | 164 | usGfsggua(Ggn)u | 438 | CAAAACCAUUGCUUC | 712 |
| 392801 | GfCfUfucacuaccc | | gaagcAfaUfgguuu | | ACUACCCA | |
| | a | | susg | | | |
| AD- | cscsauc(Ghd)Gfu | 165 | usCfsuaua(Agn)a | 439 | ACCCAUCGGUGUCCA | 713 |
| 392802 | GfUfCfcauuuauag | | uggacAfcCfgaugg | | UUUAUAGA | |
| | a | | sgsu | | | |
| AD- | ususauc(Ghd)Cfc | 166 | asCfsagcu(Ggn)u | 440 | CAUUAUCGCCUUUUG | 714 |
| 392803 | UfUfUfugacagcug | | caaaaGfgCfgauaa | | ACAGCUGU | |
| | u | | susg | | | |
| AD | asuscgc(Chd)Ufu | 167 | asCfsacag(Cgn)u | 441 | UUAUCGCCUUUUGAC | 715 |
| 392804 | UfUfGfacagcugug | | gucaaAfaGfgcgau | | AGCUGUGC | |
| | u | | sasa | | | |
| AD- | ascsaca(Ahd)Gfu | 168 | asGfsuuca(Ggn)g | 442 | UAACACAAGUAGAUG | 716 |
| 392805 | AfGfAfugccugaac | | caucuAfcUfugugu | | CCUGAACU | |
| | u | | susa | | | |
| AD- | usgsugg(Uhd)Ufu | 169 | usUfsaauu(Ggn)g | 443 | CUUGUGGUUUGUGAC | 717 |
| 392806 | GfUfGfacccaauua | | gucacAfaAfccaca | | CCAAUUAA | |
| | a | | sasg | | | |
| AD- | gsgsgau(Ghd)Cfu | 170 | asAfscguu(Cgn)a | 444 | GGGGGAUGCUUCAUG | 718 |
| 392807 | UfCfAfugugaacgu | | caugaAfgCfauccc | | UGAACGUG | |
| | u | | scsc | | | |
| AD | usgsugc(Ahd)Cfa | 171 | usCfsaaug(Cgn)c | 445 | UAUGUGCACACAUUA | 719 |
| 392808 | CfAfUfuaggcauug | | uaaugUfgUfgcaca | | GGCAUUGA | |
| | a | | susa | | | |
| AD- | asasaug(Ghd)Afa | 172 | asUfsuaua(Tgn)u | 446 | GAAAAUGGAAGUGGC | 720 |
| 392809 | GfUfGfgcaauauaa | | gccacUfuCfcauuu | | AAUAUAAG | |
| | u | | susc | | | |
| AD- | asusgga(Ahd)Gfu | 173 | asCfscuua(Tgn)a | 447 | AAAUGGAAGUGGCAA | 721 |
| 392810 | GfGfCfaauauaagg | | uugccAfcUfuccau | | UAUAAGGG | |
| | u | | susu | | | |
| AD- | usgsccc(Ghd)Afg | 174 | asGfsuuua(Agn)c | 448 | CUUGCCCGAGAUCCU | 722 |
| 392811 | AfUfCfcuguuaaac | | aggauCfuCfgggca | | GUUAAACU | |
| | u | | sasg | | | |
| AD- | asusuag(Uhd)Gfa | 175 | asCfsugau(Cgn)c | 449 | UGAUUAGUGAACCAA | 723 |
| 392812 | AfCfCfaaggaucag | | uugguUfcAfcuaau | | GGAUCAGU | |
| | u | | scsa | | | |
| AD- | gsasacc(Ahd)Afg | 176 | usCfscgua(Agn)c | 450 | GUGAACCAAGGAUCA | 724 |
| 392813 | GfAfUfcaguuacgg | | ugaucCfuUfgguuc | | GUUACGGA | |
| | a | | sasc | | | |
| AD- | asasgga(Uhd)Cfa | 177 | usCfsguuu(Cgn)c | 451 | CCAAGGAUCAGUUAC | 725 |
| 392814 | GfUfUfacggaaacg | | guaacUfgAfuccuu | | GGAAACGA | |
| | a | | sgsg | | | |
| AD- | csasaca(Chd)Afg | 178 | usCfsaacu(Tgn)c | 452 | GCCAACACAGAAAAC | 726 |
| 392815 | AfAfAfacgaaguug | | guuuuCfuGfuguug | | GAAGUUGA | |
| | a | | sgsc | | | |
| AD- | usgsggu(Uhd)Cfa | 179 | usUfsgcac(Cgn)u | 453 | UGUGGGUUCAAACAA | 727 |
| 392816 | AfAfCfaaaggugca | | uuguuUfgAfaccca | | AGGUGCAA | |
| | a | | scsa | | | |
| AD- | csasgug(Ahd)Ufc | 180 | asCfsaagg(Tgn)g | 454 | GACAGUGAUCGUCAU | 728 |
| 392817 | GfUfCfaucaccuug | | augacGfaUfcacug | | CACCUUGG | |
| | u | | susc | | | |
| AD- | ascscca(Uhd)Cfg | 181 | usAfsuaaa(Tgn)g | 455 | CUACCCAUCGGUGUC | 729 |
| 392818 | GfUfGfuccauuuau | | gacacCfgAfugggu | | CAUUUAUA | |
| | a | | sasg | | | |
| AD- | uscsuug(Uhd)Gfg | 182 | asUfsuggg(Tgn)c | 456 | AUUCUUGUGGUUUGU | 730 |
| 392819 | UfUfUfgugacccaa | | acaaaCfcAfcaaga | | GACCCAAU | |
| | u | | sasu | | | |
| AD- | ususugu(Ghd)Afc | 183 | asGfsgacu(Tgn)a | 457 | GGUUUGUGACCCAAU | 731 |
| 392820 | CfCfAfauuaagucc | | auuggGfuCfacaaa | | UAAGUCCU | |
| | u | | scsc | | | |
| AD- | ususgug(Ahd)Cfc | 184 | usAfsggac(Tgn)u | 458 | GUUUGUGACCCAAUU | 732 |
| 392821 | CfAfAfuuaaguccu | | aauugGfgUfcacaa | | AAGUCCUA | |
| | a | | sasc | | | |
| AD- | ususcag(Ahd)Ufg | 185 | usUfsggcc(Agn)a | 459 | UAUUCAGAUGACGUC | 733 |
| 392822 | AfCfGfucuuggcca | | gacguCfaUfcugaa | | UUGGCCAA | |
| | a | | susa | | | |
| AD- | asuscag(Uhd)Ufa | 186 | asGfscauc(Ggn)u | 460 | GGAUCAGUUACGGAA | 734 |
| 392823 | CfGfGfaaacgaugc | | uuccgUfaAfcugau | | ACGAUGCU | |
| | u | | scsc | | | |
| AD- | usgsgau(Ghd)Cfa | 187 | asAfsuguc(Ggn)g | 461 | GAUGGAUGCAGAAUU | 735 |
| 392824 | GfAfAfuuccgacau | | aauucUfgCfaucca | | CCGACAUG | |
| | u | | susc | | | |
| AD | gsuscca(Ahd)Gfa | 188 | asCfsguuc(Tgn)g | 462 | CUGUCCAAGAUGCAG | 736 |
| 392825 | UfGfCfagcagaacg | | cugcaUfcUfuggac | | CAGAACGG | |
| | u | | sasg | | | |
| AD- | usasccc(Ahd)Ufc | 189 | asUfsaaau(Ggn)g | 463 | ACUACCCAUCGGUGU | 737 |
| 392826 | GfGfUfguccauuua | | acaccGfaUfgggua | | CCAUUUAU | |
| | u | | sgsu | | | |
| AD- | ususuug(Ahd)Cfa | 190 | asUfsuaca(Ggn)c | 464 | CCUUUUGACAGCUGU | 738 |
| 392827 | GfCfUfgugcuguaa | | acagcUfgUfcaaaa | | GCUGUAAC | |
| | u | | sgsg | | | |
| AD- | ususgac(Ahd)Gfc | 191 | asUfsguua(Cgn)a | 465 | UUUUGACAGCUGUGC | 739 |
| 392828 | UfGfUfgcuguaaca | | gcacaGfcUfgucaa | | UGUAACAC | |
| | u | | sasa | | | |
| AD- | asgscug(Uhd)Gfc | 192 | usAfscuug(Tgn)g | 466 | ACAGCUGUGCUGUAA | 740 |
| 392829 | UfGfUfaacacaagu | | uuacaGfcAfcagcu | | CACAAGUA | |
| | a | | sgsu | | | |
| AD- | gsusuuu(Ahd)Ufg | 193 | asCfsuaau(Ggn)u | 467 | CUGUUUUAUGUGCAC | 741 |
| 392830 | UfGfCfacacauuag | | gugcaCfaUfaaaac | | ACAUUAGG | |
| | u | | sasg | | | |
| AD | ususcaa(Uhd)Ufa | 194 | asGfsagaa(Tgn)u | 468 | UCUUCAAUUACCAAG | 742 |
| 392831 | CfCfAfagaauucuc | | cuuggUfaAfuugaa | | AAUUCUCC | |
| | u | | sgsa | | | |
| AD- | csascac(Ahd)Ufc | 195 | asGfsaaua(Cgn)a | 469 | UCCACACAUCAGUAA | 743 |
| 392832 | AfGfUfaauguauuc | | uuacuGfaUfgugug | | UGUAUUCU | |
| | u | | sgsa | | | |
| AD- | usgsguc(Uhd)Cfu | 196 | asAfsuaau(Ggn)u | 470 | UUUGGUCUCUAUACU | 744 |
| 392833 | AfUfAfcuacauuau | | aguauAfgAfgacca | | ACAUUAUU | |
| | u | | sasa | | | |
| AD- | ascsccg(Uhd)Ufu | 197 | usGfsagua(Agn)a | 471 | AAACCCGUUUUAUGA | 745 |
| 392834 | UfAfUfgauuuacuc | | ucauaAfaAfcgggu | | UUUACUCA | |
| | a | | susu | | | |
| AD- | usascga(Ahd)Afa | 198 | asUfsugua(Ggn)g | 472 | GCUACGAAAAUCCAA | 746 |
| 392835 | UfCfCfaaccuacaa | | uuggaUfuUfucgua | | CCUACAAG | |
| | u | | sgsc | | | |
| AD- | uscscac(Ahd)Cfa | 199 | asAfsuaca(Tgn)u | 473 | AAUCCACACAUCAGU | 747 |
| 392836 | UfCfAfguaauguau | | acugaUfgUfgugga | | AAUGUAUU | |
| | u | | susu | | | |
| AD- | csusggu(Chd)Ufu | 200 | usUfscuug(Ggn)u | 474 | UGCUGGUCUUCAAUU | 748 |
| 392837 | CfAfAfuuaccaaga | | aauugAfaGfaccag | | ACCAAGAA | |
| | a | | scsa | | | |
| AD- | gscscau(Chd)Ufu | 201 | usUfscguu(Tgn)c | 475 | AUGCCAUCUUUGACC | 749 |
| 392838 | UfGfAfccgaaacga | | ggucaAfaGfauggc | | GAAACGAA | |
| | a | | sasu | | | |
| AD- | cscsauc(Uhd)Ufu | 202 | usUfsucgu(Tgn)u | 476 | UGCCAUCUUUGACCG | 750 |
| 392839 | GfAfCfcgaaacgaa | | cggucAfaAfgaugg | | AAACGAAA | |
| | a | | scsa | | | |
| AD- | csusacg(Ahd)Afa | 203 | usUfsguag(Ggn)u | 477 | GGCUACGAAAAUCCA | 751 |
| 392840 | AfUfCfcaaccuaca | | uggauUfuUfcguag | | ACCUACAA | |
| | a | | scsc | | | |
| AD- | asuscca(Chd)Afc | 204 | asUfsacau(Tgn)a | 478 | UAAUCCACACAUCAG | 752 |
| 392841 | AfUfCfaguaaugua | | cugauGfuGfuggau | | UAAUGUAU | |
| | u | | susa | | | |
| AD- | csasugc(Chd)Afu | 205 | asUfsuucg(Ggn)u | 479 | CUCAUGCCAUCUUUG | 753 |
| 392842 | CfUfUfugaccgaaa | | caaagAfuGfgcaug | | ACCGAAAC | |
| | u | | sasg | | | |
| AD- | gsgscua(Chd)Gfa | 206 | asUfsaggu(Tgn)g | 480 | ACGGCUACGAAAAUC | 754 |
| 392843 | AfAfAfuccaaccua | | gauuuUfcGfuagcc | | CAACCUAC | |
| | u | | sgsu | | | |
| AD- | uscsaug(Chd)Cfa | 207 | usUfsucgg(Tgn)c | 481 | UCUCAUGCCAUCUUU | 755 |
| 392844 | UfCfUfuugaccgaa | | aaagaUfgGfcauga | | GACCGAAA | |
| | a | | sgsa | | | |
| AD- | csasgua(Chd)Afc | 208 | asUfsgaug(Agn)a | 482 | AACAGUACACAUCCA | 756 |
| 392845 | AfUfCfcauucauca | | uggauGfuGfuacug | | UUCAUCAU | |
| | u | | susu | | | |
| AD- | asascgg(Chd)Ufa | 209 | asGfsuugg(Agn)u | 483 | AGAACGGCUACGAAA | 757 |
| 392846 | CfGfAfaaauccaac | | uuucgUfaGfccguu | | AUCCAACC | |
| | u | | scsu | | | |
| AD- | gsasagu(Uhd)Ufc | 210 | usUfsguau(Cgn)a | 484 | CUGAAGUUUCAUUUA | 758 |
| 392847 | AfUfUfuaugauaca | | uaaauGfaAfacuuc | | UGAUACAA | |
| | a | | sasg | | | |
| AD- | asusgcc(Ahd)Ufc | 211 | asGfsuuuc(Ggn)g | 485 | UCAUGCCAUCUUUGA | 759 |
| 392848 | UfUfUfgaccgaaac | | ucaaaGfaUfggcau | | CCGAAACG | |
| | u | | sgsa | | | |
| AD- | gsasacg(Ghd)Cfu | 212 | asUfsugga(Tgn)u | 486 | CAGAACGGCUACGAA | 760 |
| 392849 | AfCfGfaaaauccaa | | uucguAfgCfcguuc | | AAUCCAAC | |
| | u | | susg | | | |
| AD- | uscsuuc(Ghd)Ufg | 213 | asAfscaua(Agn)a | 487 | UUUCUUCGUGCCUGU | 761 |
| 392850 | CfCfUfguuuuaugu | | acaggCfaCfgaaga | | UUUAUGUG | |
| | u | | sasa | | | |
| AD- | ususgcc(Chd)Gfa | 214 | asUfsuuaa(Cgn)a | 488 | UCUUGCCCGAGAUCC | 762 |
| 392851 | GfAfUfccuguuaaa | | ggaucUfcGfggcaa | | UGUUAAAC | |
| | u | | sgsa | | | |
| AD- | csusucg(Uhd)Gfc | 215 | asCfsacau(Agn)a | 489 | UUCUUCGUGCCUGUU | 763 |
| 392852 | CfUfGfuuuuaugug | | aacagGfcAfcgaag | | UUAUGUGC | |
| | u | | sasa | | | |
| AD- | gscsgcc(Ahd)Ufg | 216 | asUfsaaac(Tgn)u | 490 | CAGCGCCAUGUCCCA | 764 |
| 392853 | UfCfCfcaaaguuua | | ugggaCfaUfggcgc | | AAGUUUAC | |
| | u | | susg | | | |
| AD- | gsuscau(Ahd)Gfc | 217 | asAfscgau(Cgn)a | 491 | UUGUCAUAGCGACAG | 765 |
| 392854 | GfAfCfagugaucgu | | cugucGfcUfaugac | | UGAUCGUC | |
| | u | | sasa | | | |
| AD- | gscsuac(Ghd)Afa | 218 | usGfsuagg(Tgn)u | 492 | CGGCUACGAAAAUCC | 766 |
| 392855 | AfAfUfccaaccuac | | ggauuUfuCfguagc | | AACCUACA | |
| | a | | scsg | | | |
| AD- | asusagc(Ghd)Afc | 219 | asAfsugac(Ggn)a | 493 | UCAUAGCGACAGUGA | 767 |
| 392856 | AfGfUfgaucgucau | | ucacuGfuCfgcuau | | UCGUCAUC | |
| | u | | sgsa | | | |
| AD- | csusugc(Chd)Cfg | 220 | usUfsuaac(Agn)g | 494 | CUCUUGCCCGAGAUC | 768 |
| 392857 | AfGfAfuccuguuaa | | gaucuCfgGfgcaag | | CUGUUAAA | |
| | a | | sasg | | | |
| AD- | csuscau(Ghd)Cfc | 221 | usUfscggu(Cgn)a | 495 | CUCUCAUGCCAUCUU | 769 |
| 392858 | AfUfCfuuugaccga | | aagauGfgCfaugag | | UGACCGAA | |
| | a | | sasg | | | |
| AD- | ascsggc(Uhd)Afc | 222 | asGfsguug(Ggn)a | 496 | GAACGGCUACGAAAA | 770 |
| 392859 | GfAfAfaauccaacc | | uuuucGfuAfgccgu | | UCCAACCU | |
| | u | | susc | | | |
| AD- | csasuca(Ahd)Afa | 223 | asAfsagaa(Cgn)a | 497 | AUCAUCAAAAAUUGG | 771 |
| 392860 | AfUfUfgguguucuu | | ccaauUfuUfugaug | | UGUUCUUU | |
| | u | | sasu | | | |
| AD | asuscca(Ahd)Cfc | 224 | csAfsaaga(Agn)c | 498 | AAAUCCAACCUACAA | 772 |
| 392861 | UfAfCfaaguucuuu | | uuguaGfgUfuggau | | GUUCUUUG | |
| | g | | susu | | | |
| AD- | csgscuu(Uhd)Cfu | 225 | usGfsuaau(Agn)c | 499 | AUCGCUUUCUACACU | 773 |
| 392862 | AfCfAfcuguauuac | | aguguAfgAfaagcg | | GUAUUACA | |
| | a | | sasu | | | |
| AD- | uscscaa(Chd)Cfu | 226 | usCfsaaag(Agn)a | 500 | AAUCCAACCUACAAG | 774 |
| 392863 | AfCfAfaguucuuug | | cuuguAfgGfuugga | | UUCUUUGA | |
| | a | | susu | | | |
| AD- | uscsucu(Chd)Ufu | 227 | asGfsacca(Agn)a | 501 | UAUCUCUCUUUACAU | 775 |
| 392864 | UfAfCfauuuugguc | | auguaAfaGfagaga | | UUUGGUCU | |
| | u | | susa | | | |
| AD- | csuscuc(Uhd)Ufu | 228 | asAfsgacc(Agn)a | 502 | AUCUCUCUUUACAUU | 776 |
| 392865 | AfCfAfuuuuggucu | | aauguAfaAfgagag | | UUGGUCUC | |
| | u | | sasu | | | |
| AD- | ususugu(Ghd)Ufa | 229 | asAfsauuc(Tgn)u | 503 | GUUUUGUGUACUGUA | 777 |
| 392866 | CfUfGfuaaagaauu | | uacagUfaCfacaaa | | AAGAAUUU | |
| | u | | sasc | | | |
| AD- | gsusgua(Chd)Ufg | 230 | asCfsuaaa(Tgn)u | 504 | UUGUGUACUGUAAAG | 778 |
| 392867 | UfAfAfagaauuuag | | cuuuaCfaGfuacac | | AAUUUAGC | |
| | u | | sasa | | | |
| AD- | ascscca(Ahd)Ufu | 231 | usAfsaagu(Agn)g | 505 | UGACCCAAUUAAGUC | 779 |
| 392868 | AfAfGfuccuacuuu | | gacuuAfaUfugggu | | CUACUUUA | |
| | a | | scsa | | | |
| AD- | uscscua(Chd)Ufu | 232 | usAfsaagc(Agn)u | 506 | AGUCCUACUUUACAU | 780 |
| 392869 | UfAfCfauaugcuuu | | auguaAfaGfuagga | | AUGCUUUA | |
| | a | | scsu | | | |
| AD- | cscsuac(Uhd)Ufu | 233 | usUfsaaag(Cgn)a | 507 | GUCCUACUUUACAUA | 781 |
| 392870 | AfCfAfuaugcuuua | | uauguAfaAfguagg | | UGCUUUAA | |
| | a | | sasc | | | |
| AD- | ususcua(Chd)Afc | 234 | usUfsuaug(Tgn)a | 508 | CUUUCUACACUGUAU | 782 |
| 392871 | UfGfUfauuacauaa | | auacaGfuGfuagaa | | UACAUAAA | |
| | a | | sasg | | | |
| AD- | uscsuac(Ahd)Cfu | 235 | asUfsuuau(Ggn)u | 509 | UUUCUACACUGUAUU | 783 |
| 392872 | GfUfAfuuacauaaa | | aauacAfgUfguaga | | ACAUAAAU | |
| | u | | sasa | | | |
| AD- | csusuuu(Ahd)Afg | 236 | asUfsugaa(Ggn)a | 510 | UUCUUUUAAGAUGUG | 784 |
| 392873 | AfUfGfugucuucaa | | cacauCfuUfaaaag | | UCUUCAAU | |
| | u | | sasa | | | |
| AD- | asusgug(Uhd)Cfu | 237 | usUfsauac(Agn)a | 511 | AGAUGUGUCUUCAAU | 785 |
| 392874 | UfCfAfauuuguaua | | auugaAfgAfcacau | | UUGUAUAA | |
| | a | | scsu | | | |
| AD- | asuscaa(Ahd)Afa | 238 | csAfsaaga(Agn)c | 512 | UCAUCAAAAAUUGGU | 786 |
| 392875 | UfUfGfguguucuuu | | accaaUfuUfuugau | | GUUCUUUG | |
| | g | | sgsa | | | |
| AD- | asasauc(Chd)Afa | 239 | asAfsgaac(Tgn)u | 513 | GAAAAUCCAACCUAC | 787 |
| 392876 | CfCfUfacaaguucu | | guaggUfuGfgauuu | | AAGUUCUU | |
| | u | | susc | | | |
| AD- | gsusacu(Ghd)Ufa | 240 | asAfsgcua(Agn)a | 514 | GUGUACUGUAAAGAA | 788 |
| 392877 | AfAfGfaauuuagcu | | uucuuUfaCfaguac | | UUUAGCUG | |
| | u | | sasc | | | |
| AD- | csusccu(Ghd)Afu | 241 | usAfsugug(Agn)u | 515 | CUCUCCUGAUUAUUU | 789 |
| 392878 | UfAfUfuuaucacau | | aaauaAfuCfaggag | | AUCACAUA | |
| | a | | sasg | | | |
| AD | gscscag(Uhd)Ufg | 242 | asAfsagaa(Tgn)a | 516 | UAGCCAGUUGUAUAU | 790 |
| 392879 | UfAfUfauuauucuu | | auauaCfaAfcuggc | | UAUUCUUG | |
| | u | | susa | | | |
| AD- | asasuua(Ahd)Gfu | 243 | usAfsugua(Agn)a | 517 | CCAAUUAAGUCCUAC | 791 |
| 392880 | CfCfUfacuuuacau | | guaggAfcUfuaauu | | UUUACAUA | |
| | a | | sgsg | | | |
| AD- | csusugc(Chd)Ufa | 244 | asGfsaaag(Ggn)a | 518 | CUCUUGCCUAAGUAU | 792 |
| 392881 | AfGfUfauuccuuuc | | auacuUfaGfgcaag | | UCCUUUCC | |
| | u | | sasg | | | |
| AD- | asusucc(Uhd)Ufu | 245 | asAfsuagu(Ggn)a | 519 | GUAUUCCUUUCCUGA | 793 |
| 392882 | CfCfUfgaucacuau | | ucaggAfaAfggaau | | UCACUAUG | |
| | u | | sasc | | | |
| AD- | ascsuau(Ghd)Cfa | 246 | usUfsuaac(Tgn)u | 520 | UCACUAUGCAUUUUA | 794 |
| 392883 | UfUfUfuaaaguuaa | | uaaaaUfgCfauagu | | AAGUUAAA | |
| | a | | sgsa | | | |
| AD- | usgsuuc(Ahd)Ufu | 247 | usAfsaaag(Tgn)g | 521 | CCUGUUCAUUGUAAG | 795 |
| 392884 | GfUfAfagcacuuuu | | cuuacAfaUfgaaca | | CACUUUUA | |
| | a | | sgsg | | | |
| AD- | asasuua(Chd)Cfa | 248 | usUfsugga(Ggn)a | 522 | UCAAUUACCAAGAAU | 796 |
| 392885 | AfGfAfauucuccaa | | auucuUfgGfuaauu | | UCUCCAAA | |
| | a | | sgsa | | | |
| AD- | ususacc(Ahd)Afg | 249 | asUfsuuug(Ggn)a | 523 | AAUUACCAAGAAUUC | 797 |
| 392886 | AfAfUfucuccaaaa | | gaauuCfuUfgguaa | | UCCAAAAC | |
| | u | | susu | | | |
| AD- | uscsauu(Ghd)Cfu | 250 | asGfsauca(Tgn)g | 524 | AAUCAUUGCUUAUGA | 798 |
| 392887 | UfAfUfgacaugauc | | ucauaAfgCfaauga | | CAUGAUCG | |
| | u | | susu | | | |
| AD- | ususuua(Ahd)Gfa | 251 | asAfsuuga(Agn)g | 525 | UCUUUUAAGAUGUGU | 799 |
| 392889 | UfGfUfgucuucaau | | acacaUfcUfuaaaa | | CUUCAAUU | |
| | u | | sgsa | | | |
| AD- | asusccu(Ghd)Ufu | 252 | usUfsguag(Ggn)a | 526 | AGAUCCUGUUAAACU | 800 |
| 392890 | AfAfAfcuuccuaca | | aguuuAfaCfaggau | | UCCUACAA | |
| | a | | scsu | | | |
| AD- | ascsuau(Uhd)Cfa | 253 | asCfsaaga(Cgn)g | 527 | AAACUAUUCAGAUGA | 801 |
| 392891 | GfAfUfgacgucuug | | ucaucUfgAfauagu | | CGUCUUGG | |
| | u | | susu | | | |
| AD- | gsusuca(Uhd)Cfa | 254 | asAfsccaa(Tgn)u | 528 | AAGUUCAUCAUCAAA | 802 |
| 392892 | UfCfAfaaaauuggu | | uuugaUfgAfugaac | | AAUUGGUG | |
| | u | | susu | | | |
| AD- | usasucu(Chd)Ufc | 255 | asCfscaaa(Agn)u | 529 | UCUAUCUCUCUUUAC | 803 |
| 392893 | UfUfUfacauuuugg | | guaaaGfaGfagaua | | AUUUUGGU | |
| | u | | sgsa | | | |
| AD- | asuscuc(Uhd)Cfu | 256 | asAfsccaa(Agn)a | 530 | CUAUCUCUCUUUACA | 804 |
| 392894 | UfUfAfcauuuuggu | | uguaaAfgAfgagau | | UUUUGGUC | |
| | u | | sasg | | | |
| AD- | usgsugu(Ahd)Cfu | 257 | asUfsaaau(Tgn)c | 531 | UUUGUGUACUGUAAA | 805 |
| 392895 | GfUfAfaagaauuua | | uuuacAfgUfacaca | | GAAUUUAG | |
| | u | | sasa | | | |
| AD- | csusacu(Uhd)Ufa | 258 | asUfsuaaa(Ggn)c | 532 | UCCUACUUUACAUAU | 806 |
| 392896 | CfAfUfaugcuuuaa | | auaugUfaAfaguag | | GCUUUAAG | |
| | u | | sgsa | | | |
| AD- | usgsccu(Ahd)Afg | 259 | asAfsggaa(Agn)g | 533 | CUUGCCUAAGUAUUC | 807 |
| 392897 | UfAfUfuccuuuccu | | gaauaCfuUfaggca | | CUUUCCUG | |
| | u | | sasg | | | |
| AD- | asasgua(Uhd)Ufc | 260 | asUfsgauc(Agn)g | 534 | CUAAGUAUUCCUUUC | 808 |
| 392898 | CfUfUfuccugauca | | gaaagGfaAfuacuu | | CUGAUCAC | |
| | u | | sasg | | | |
| AD- | gsusauu(Chd)Cfu | 261 | usAfsguga(Tgn)c | 535 | AAGUAUUCCUUUCCU | 809 |
| 392899 | UfUfCfcugaucacu | | aggaaAfgGfaauac | | GAUCACUA | |
| | a | | susu | | | |
| AD- | ususccu(Ghd)Afu | 262 | asAfsaaug(Cgn)a | 536 | CUUUCCUGAUCACUA | 810 |
| 392900 | CfAfCfuaugcauuu | | uagugAfuCfaggaa | | UGCAUUUU | |
| | u | | sasg | | | |
| AD- | csusgau(Chd)Afc | 263 | usUfsuaaa(Agn)u | 537 | UCCUGAUCACUAUGC | 811 |
| 392901 | UfAfUfgcauuuuaa | | gcauaGfuGfaucag | | AUUUUAAA | |
| | a | | sgsa | | | |
| AD- | csascgu(Ahd)Ufc | 264 | usCfsaaag(Agn)c | 538 | UCCACGUAUCUUUGG | 812 |
| 392902 | UfUfUfgggucuuug | | ccaaaGfaUfacgug | | GUCUUUGA | |
| | a | | sgsa | | | |
| AD- | usgsggu(Chd)Ufu | 265 | asUfsuuuc(Tgn)u | 539 | UUUGGGUCUUUGAUA | 813 |
| 392903 | UfGfAfuaaagaaaa | | uaucaAfaGfaccca | | AAGAAAAG | |
| | u | | sasa | | | |
| AD- | uscsaau(Uhd)Afc | 266 | usGfsgaga(Agn)u | 540 | CUUCAAUUACCAAGA | 814 |
| 392904 | CfAfAfgaauucucc | | ucuugGfuAfauuga | | AUUCUCCA | |
| | a | | sasg | | | |
| AD- | uscsgcu(Uhd)Ufc | 267 | asUfsaaua(Cgn)a | 541 | GAUCGCUUUCUACAC | 815 |
| 392906 | UfAfCfacuguauua | | guguaGfaAfagcga | | UGUAUUAC | |
| | u | | susc | | | |
| AD- | asusuuu(Chd)Ufu | 268 | usUfscaga(Cgn)u | 542 | CAAUUUUCUUUAACC | 816 |
| 392907 | UfAfAfccagucuga | | gguuaAfaGfaaaau | | AGUCUGAA | |
| | a | | susg | | | |
| AD- | csusuua(Ahd)Cfc | 269 | gsAfsaacu(Tgn)c | 543 | UUCUUUAACCAGUCU | 817 |
| 392908 | AfGfUfcugaaguuu | | agacuGfgUfuaaag | | GAAGUUUC | |
| | c | | sasa | | | |
| AD- | usasaga(Uhd)Gfu | 270 | asCfsaaau(Tgn)g | 544 | UUUAAGAUGUGUCUU | 818 |
| 392909 | GfUfCfuucaauuug | | aagacAfcAfucuua | | CAAUUUGU | |
| | u | | sasa | | | |
| AD- | gsasucc(Uhd)Gfu | 271 | usGfsuagg(Agn)a | 545 | GAGAUCCUGUUAAAC | 819 |
| 392910 | UfAfAfacuuccuac | | guuuaAfcAfggauc | | UUCCUACA | |
| | a | | susc | | | |
| AD- | csusgcu(Uhd)Cfa | 272 | asUfsuuug(Cgn)u | 546 | AGCUGCUUCAGAAAG | 820 |
| 392911 | GfAfAfagagcaaaa | | cuuucUfgAfagcag | | AGCAAAAC | |
| | u | | scsu | | | |
| AD- | csasgaa(Ahd)Gfa | 273 | usGfsaaua(Ggn)u | 547 | UUCAGAAAGAGCAAA | 821 |
| 392912 | GfCfAfaaacuauuc | | uuugcUfcUfuucug | | ACUAUUCA | |
| | a | | sasa | | | |
| AD- | usasuga(Ahd)Gfu | 274 | usUfsuuug(Agn)u | 548 | GAUAUGAAGUUCAUC | 822 |
| 392913 | UfCfAfucaucaaaa | | gaugaAfcUfucaua | | AUCAAAAA | |
| | a | | susc | | | |
| AD- | csasuca(Uhd)Cfa | 275 | asAfsacac(Cgn)a | 549 | UUCAUCAUCAAAAAU | 823 |
| 392914 | AfAfAfauugguguu | | auuuuUfgAfugaug | | UGGUGUUC | |
| | u | | sasa | | | |
| AD- | uscsaaa(Ahd)Afu | 276 | asCfsaaag(Agn)a | 550 | CAUCAAAAAUUGGUG | 824 |
| 392915 | UfGfGfuguucuuug | | caccaAfuUfuuuga | | UUCUUUGC | |
| | u | | susg | | | |
| AD- | asasaau(Chd)Cfa | 277 | asGfsaacu(Tgn)g | 551 | CGAAAAUCCAACCUA | 825 |
| 392916 | AfCfCfuacaaguuc | | uagguUfgGfauuuu | | CAAGUUCU | |
| | u | | scsg | | | |
| AD- | cscsaac(Chd)Ufa | 278 | asUfscaaa(Ggn)a | 552 | AUCCAACCUACAAGU | 826 |
| 392917 | CfAfAfguucuuuga | | acuugUfaGfguugg | | UCUUUGAG | |
| | u | | sasu | | | |
| AD- | ascsuca(Uhd)Ufa | 279 | usGfsucaa(Agn)a | 553 | UUACUCAUUAUCGCC | 827 |
| 392918 | UfCfGfccuuuugac | | ggcgaUfaAfugagu | | UUUUGACA | |
| | a | | sasa | | | |
| AD- | csuscau(Uhd)Afu | 280 | asUfsguca(Agn)a | 554 | UACUCAUUAUCGCCU | 828 |
| 392919 | CfGfCfcuuuugaca | | aggcgAfuAfaugag | | UUUGACAG | |
| | u | | susa | | | |
| AD- | usgsugc(Uhd)Gfu | 281 | asUfscuac(Tgn)u | 555 | GCUGUGCUGUAACAC | 829 |
| 392920 | AfAfCfacaaguaga | | guguuAfcAfgcaca | | AAGUAGAU | |
| | u | | sgsc | | | |
| AD- | gsusgcu(Ghd)Ufa | 282 | asAfsucua(Cgn)u | 556 | CUGUGCUGUAACACA | 830 |
| 392921 | AfCfAfcaaguagau | | uguguUfaCfagcac | | AGUAGAUG | |
| | u | | sasg | | | |
| AD- | uscsuuu(Ahd)Cfa | 283 | asUfsagag(Agn)c | 557 | UCUCUUUACAUUUUG | 831 |
| 392922 | UfUfUfuggucucua | | caaaaUfgUfaaaga | | GUCUCUAU | |
| | u | | sgsa | | | |
| AD- | asusggg(Uhd)Ufu | 284 | usUfsuaca(Ggn)u | 558 | UAAUGGGUUUUGUGU | 832 |
| 392923 | UfGfUfguacuguaa | | acacaAfaAfcccau | | ACUGUAAA | |
| | a | | susa | | | |
| AD- | ususgug(Uhd)Afc | 285 | usAfsaauu(Cgn)u | 559 | UUUUGUGUACUGUAA | 833 |
| 392924 | UfGfUfaaagaauuu | | uuacaGfuAfcacaa | | AGAAUUUA | |
| | a | | sasa | | | |
| AD- | gscsugu(Ahd)Ufc | 286 | asAfsugca(Cgn)u | 560 | UAGCUGUAUCAAACU | 834 |
| 392925 | AfAfAfcuagugcau | | aguuuGfaUfacagc | | AGUGCAUG | |
| | u | | susa | | | |
| AD- | csusagu(Ghd)Cfa | 287 | asAfsgaau(Cgn)u | 561 | AACUAGUGCAUGAAU | 835 |
| 392926 | UfGfAfauagauucu | | auucaUfgCfacuag | | AGAUUCUC | |
| | u | | susu | | | |
| AD- | usasgug(Chd)Afu | 288 | asGfsagaa(Tgn)c | 562 | ACUAGUGCAUGAAUA | 836 |
| 392927 | GfAfAfuagauucuc | | uauucAfuGfcacua | | GAUUCUCU | |
| | u | | sgsu | | | |
| AD- | csuscuc(Chd)Ufg | 289 | usGfsugau(Agn)a | 563 | UUCUCUCCUGAUUAU | 837 |
| 392928 | AfUfUfauuuaucac | | auaauCfaGfgagag | | UUAUCACA | |
| | a | | sasa | | | |
| AD- | cscsuga(Uhd)Ufa | 290 | asCfsuaug(Tgn)g | 564 | CUCCUGAUUAUUUAU | 838 |
| 392929 | UfUfUfaucacauag | | auaaaUfaAfucagg | | CACAUAGC | |
| | u | | sasg | | | |
| AD- | usasagu(Chd)Cfu | 291 | asCfsauau(Ggn)u | 565 | AUUAAGUCCUACUUU | 839 |
| 392930 | AfCfUfuuacauaug | | aaaguAfgGfacuua | | ACAUAUGC | |
| | u | | sasu | | | |
| AD- | asgsucc(Uhd)Afc | 292 | asAfsgcau(Agn)u | 566 | UAAGUCCUACUUUAC | 840 |
| 392931 | UfUfUfacauaugcu | | guaaaGfuAfggacu | | AUAUGCUU | |
| | u | | susa | | | |
| AD- | gsusccu(Ahd)Cfu | 293 | asAfsagca(Tgn)a | 567 | AAGUCCUACUUUACA | 841 |
| 392932 | UfUfAfcauaugcuu | | uguaaAfgUfaggac | | UAUGCUUU | |
| | u | | susu | | | |
| AD- | ususcuc(Uhd)Ufg | 294 | asGfsgaau(Agn)c | 568 | GCUUCUCUUGCCUAA | 842 |
| 392933 | CfCfUfaaguauucc | | uuaggCfaAfgagaa | | GUAUUCCU | |
| | u | | sgsc | | | |
| AD- | csuscuu(Ghd)Cfc | 295 | asAfsagga(Agn)u | 569 | UUCUCUUGCCUAAGU | 843 |
| 392934 | UfAfAguauuccuuu | | acuuaGfgCfaagag | | AUUCCUUU | |
| | | | sasa | | | |
| AD- | usasuuc(Chd)Ufu | 296 | asUfsagug(Agn)u | 570 | AGUAUUCCUUUCCUG | 844 |
| 392935 | UfCfCfugaucacua | | caggaAfaGfgaaua | | AUCACUAU | |
| | u | | scsu | | | |
| AD- | ususucc(Uhd)Gfa | 297 | asAfsaugc(Agn)u | 571 | CCUUUCCUGAUCACU | 845 |
| 392936 | UfCfAfcuaugcauu | | agugaUfcAfggaaa | | AUGCAUUU | |
| | u | | sgsg | | | |
| AD- | csascua(Uhd)Gfc | 298 | usUfsaacu(Tgn)u | 572 | AUCACUAUGCAUUUU | 846 |
| 392937 | AfUfUfuuaaaguua | | aaaauGfcAfuagug | | AAAGUUAA | |
| | a | | sasu | | | |
| AD- | csusgca(Uhd)Ufu | 299 | asAfsucug(Tgn)a | 573 | GACUGCAUUUUACUG | 847 |
| 392938 | UfAfCfuguacagau | | caguaAfaAfugcag | | UACAGAUU | |
| | u | | susc | | | |
| AD- | ususcug(Chd)Ufa | 300 | usAfsuauc(Agn)c | 574 | GCUUCUGCUAUAUUU | 848 |
| 392939 | UfAfUfuugugauau | | aaauaUfaGfcagaa | | GUGAUAUA | |
| | a | | sgsc | | | |
| AD- | uscsugc(Uhd)Afu | 301 | asUfsauau(Cgn)a | 575 | CUUCUGCUAUAUUUG | 849 |
| 392940 | AfUfUfugugauaua | | caaauAfuAfgcaga | | UGAUAUAG | |
| | u | | sasg | | | |
| AD- | ascsgua(Uhd)Cfu | 302 | asUfscaaa(Ggn)a | 576 | CCACGUAUCUUUGGG | 850 |
| 392941 | UfUfGfggucuuuga | | cccaaAfgAfuacgu | | UCUUUGAU | |
| | u | | sgsg | | | |
| AD- | uscsuuu(Ghd)Gfg | 303 | usCfsuuua(Tgn)c | 577 | UAUCUUUGGGUCUUU | 851 |
| 392942 | UfCfUfuugauaaag | | aaagaCfcCfaaaga | | GAUAAAGA | |
| | a | | susa | | | |
| AD- | csusuug(Ghd)Gfu | 304 | usUfscuuu(Agn)u | 578 | AUCUUUGGGUCUUUG | 852 |
| 392943 | CfUfUfugauaaaga | | caaagAfcCfcaaag | | AUAAAGAA | |
| | a | | sasu | | | |
| AD- | ususggg(Uhd)Cfu | 305 | usUfsuucu(Tgn)u | 579 | CUUUGGGUCUUUGAU | 853 |
| 392944 | UfUfGfauaaagaaa | | aucaaAfgAfcccaa | | AAAGAAAA | |
| | a | | sasg | | | |
| AD- | asgsaau(Chd)Cfc | 306 | asUfsuaca(Agn)u | 580 | AAAGAAUCCCUGUUC | 854 |
| 392945 | UfGfUfucauuguaa | | gaacaGfgGfauucu | | AUUGUAAG | |
| | u | | susu | | | |
| AD- | gsasauc(Chd)Cfu | 307 | asCfsuuac(Agn)a | 581 | AAGAAUCCCUGUUCA | 855 |
| 392946 | GfUfUfcauuguaag | | ugaacAfgGfgauuc | | UUGUAAGC | |
| | u | | susu | | | |
| AD- | gsusuca(Uhd)Ufg | 308 | asUfsaaaa(Ggn)u | 582 | CUGUUCAUUGUAAGC | 856 |
| 392947 | UfAfAfgcacuuuua | | gcuuaCfaAfugaac | | ACUUUUAC | |
| | u | | sasg | | | |
| AD- | ususaug(Ahd)Cfa | 309 | usAfsgaaa(Ggn)c | 583 | GCUUAUGACAUGAUC | 857 |
| 392948 | UfGfAfucgcuuucu | | gaucaUfgUfcauaa | | GCUUUCUA | |
| | a | | sgsc | | | |
| AD- | asusgac(Ahd)Ufg | 310 | usGfsuaga(Agn)a | 584 | UUAUGACAUGAUCGC | 858 |
| 392949 | AfUfCfgcuuucuac | | gcgauCfaUfgucau | | UUUCUACA | |
| | a | | sasa | | | |
| AD- | csasuga(Uhd)Cfg | 311 | asCfsagug(Tgn)a | 585 | GACAUGAUCGCUUUC | 859 |
| 392950 | CfUfUfucuacacug | | gaaagCfgAfucaug | | UACACUGU | |
| | u | | susc | | | |
| AD- | csusuuc(Uhd)Afc | 312 | usAfsugua(Agn)u | 586 | CGCUUUCUACACUGU | 860 |
| 392951 | AfCfUfguauuacau | | acaguGfuAfgaaag | | AUUACAUA | |
| | a | | scsg | | | |
| AD- | gsasuuc(Ahd)Afu | 313 | asUfsgguu(Agn)a | 587 | CAGAUUCAAUUUUCU | 861 |
| 392952 | UfUfUfcuuuaacca | | agaaaAfuUfgaauc | | UUAACCAG | |
| | u | | susg | | | |
| AD- | ususucu(Uhd)Ufa | 314 | asCfsuuca(Ggn)a | 588 | AUUUUCUUUAACCAG | 862 |
| 392953 | AfCfCfagucugaag | | cugguUfaAfagaaa | | UCUGAAGU | |
| | u | | sasu | | | |
| AD- | ususuaa(Ghd)Afu | 315 | asAfsauug(Agn)a | 589 | CUUUUAAGAUGUGUC | 863 |
| 392954 | GfUfGfucuucaauu | | gacacAfuCfuuaaa | | UUCAAUUU | |
| | u | | sasg | | | |
| AD- | ususaag(Ahd)Ufg | 316 | csAfsaauu(Ggn)a | 590 | UUUUAAGAUGUGUCU | 864 |
| 392955 | UfGfUfcuucaauuu | | agacaCfaUfcuuaa | | UCAAUUUG | |
| | g | | sasa | | | |
| AD- | asgsaug(Uhd)Gfu | 317 | asUfsacaa(Agn)u | 591 | UAAGAUGUGUCUUCA | 865 |
| 392956 | CfUfUfcaauuugua | | ugaagAfcAfcaucu | | AUUUGUAU | |
| | u | | susa | | | |
| AD- | usgsucu(Uhd)Cfa | 318 | asUfsuuua(Tgn)a | 592 | UGUGUCUUCAAUUUG | 866 |
| 392957 | AfUfUfuguauaaaa | | caaauUfgAfagaca | | UAUAAAAU | |
| | u | | scsa | | | |
| AD- | csusuca(Ahd)Ufu | 319 | asCfscauu(Tgn)u | 593 | GUCUUCAAUUUGUAU | 867 |
| 392958 | UfGfUfauaaaaugg | | auacaAfaUfugaag | | AAAAUGGU | |
| | u | | sasc | | | |
| AD- | asusggu(Ghd)Ufu | 320 | usUfsauuu(Agn)c | 594 | AAAUGGUGUUUUCAU | 868 |
| 392959 | UfUfCfauguaaaua | | augaaAfaCfaccau | | GUAAAUAA | |
| | a | | susu | | | |
| AD- | ususcuu(Uhd)Ufa | 321 | usGfsaaga(Cgn)a | 595 | CCUUCUUUUAAGAUG | 869 |
| 392960 | AfGfAfugugucuuc | | caucuUfaAfaagaa | | UGUCUUCA | |
| | a | | sgsg | | | |
| AD- | usgsuau(Uhd)Cfu | 322 | usGfsuaaa(Ggn)a | 596 | AAUGUAUUCUAUCUC | 870 |
| 392961 | AfUfCfucucuuuac | | gagauAfgAfauaca | | UCUUUACA | |
| | a | | susu | | | |
| AD- | gsuscuc(Uhd)Afu | 323 | usUfsaaua(Agn)u | 597 | UGGUCUCUAUACUAC | 871 |
| 392962 | AfCfUfacauuauua | | guaguAfuAfgagac | | AUUAUUAA | |
| | a | | scsa | | | |
| AD- | uscsucu(Ahd)Ufa | 324 | asUfsuaau(Agn)a | 598 | GGUCUCUAUACUACA | 872 |
| 392963 | CfUfAfcauuauuaa | | uguagUfaUfagaga | | UUAUUAAU | |
| | u | | scsc | | | |
| AD | csuscua(Uhd)Afc | 325 | asAfsuuaa(Tgn)a | 599 | GUCUCUAUACUACAU | 873 |
| 392964 | UfAfCfauuauuaau | | auguaGfuAfuagag | | UAUUAAUG | |
| | u | | sasc | | | |
| AD- | csusuca(Ahd)Ufu | 326 | asAfsgaau(Tgn)c | 600 | GUCUUCAAUUACCAA | 874 |
| 392965 | AfCfCfaagaauucu | | uugguAfaUfugaag | | GAAUUCUC | |
| | u | | sasc | | | |
| AD- | cscsaca(Chd)Afu | 327 | asAfsauac(Agn)u | 601 | AUCCACACAUCAGUA | 875 |
| 392966 | CfAfGfuaauguauu | | uacugAfuGfugugg | | AUGUAUUC | |
| | u | | sasu | | | |
| AD- | csusauc(Uhd)Cfu | 328 | asCfsaaaa(Tgn)g | 602 | UUCUAUCUCUCUUUA | 876 |
| 392967 | CfUfUfuacauuuug | | uaaagAfgAfgauag | | CAUUUUGG | |
| | u | | sasa | | | |
| AD- | gsgsucu(Chd)Ufa | 329 | usAfsauaa(Tgn)g | 603 | UUGGUCUCUAUACUA | 877 |
| 392968 | UfAfCfuacauuauu | | uaguaUfaGfagacc | | CAUUAUUA | |
| | a | | sasa | | | |
| AD- | uscsuau(Ahd)Cfu | 330 | asCfsauua(Agn)u | 604 | UCUCUAUACUACAUU | 878 |
| 392969 | AfCfAfuuauuaaug | | aauguAfgUfauaga | | AUUAAUGG | |
| | u | | sgsa | | | |
| AD- | gsgsucu(Uhd)Cfa | 331 | asAfsuucu(Tgn)g | 605 | CUGGUCUUCAAUUAC | 879 |
| 392970 | AfUfUfaccaagaau | | guaauUfgAfagacc | | CAAGAAUU | |
| | u | | sasg | | | |
| AD- | csasgga(Uhd)Afu | 332 | asAfsugau(Ggn)a | 606 | CUCAGGAUAUGAAGU | 880 |
| 392971 | GfAfAfguucaucau | | acuucAfuAfuccug | | UCAUCAUC | |
| | u | | sasg | | | |
| AD- | ascsaca(Uhd)Cfa | 333 | usAfsgaau(Agn)c | 607 | CCACACAUCAGUAAU | 881 |
| 392972 | GfUfAfauguauucu | | auuacUfgAfugugu | | GUAUUCUA | |
| | a | | sgsg | | | |
| AD- | csusaua(Chd)Ufa | 334 | asCfscauu(Agn)a | 608 | CUCUAUACUACAUUA | 882 |
| 392973 | CfAfUfuauuaaugg | | uaaugUfaGfuauag | | UUAAUGGG | |
| | u | | sasg | | | |
| AD- | cscscgu(Uhd)Ufu | 335 | asUfsgagu(Agn)a | 609 | AACCCGUUUUAUGAU | 883 |
| 392974 | AfUfGfauuuacuca | | aucauAfaAfacggg | | UUACUCAU | |
| | u | | susu | | | |
| AD- | ususcca(Uhd)Gfa | 336 | asAfsguaa(Agn)a | 610 | UUUUCCAUGACUGCA | 884 |
| 392975 | CfUfGfcauuuuacu | | ugcagUfcAfuggaa | | UUUUACUG | |
| | u | | sasa | | | |
| AD- | uscsuuc(Ahd)Afu | 337 | asGfsaauu(Cgn)u | 611 | GGUCUUCAAUUACCA | 885 |
| 392976 | UfAfCfcaagaauuc | | ugguaAfuUfgaaga | | AGAAUUCU | |
| | u | | scsc | | | |
| AD- | csusgaa(Ghd)Ufu | 338 | asUfsauca(Tgn)a | 612 | GUCUGAAGUUUCAUU | 886 |
| 392977 | UfCfAfuuuaugaua | | aaugaAfaCfuucag | | UAUGAUAC | |
| | u | | sasc | | | |

TABLE 4
Additional Exemplary Human APP-Targeting RNAi Duplexes, Unmodified Sequences
(Human NM_000484 Targeting)

| | | SEQ | | | SEQ | |
|---|---|---|---|---|---|---|
| Duplex | Sense Sequence | ID | Position in | Antisense Sequence | ID | Position in |
| Name | (5′ to 3′) | NO | NM_000484 | (5′ to 3′) | NO | NM_000484 |
| AD-392853 | GCGCCAUGUCCCAAAGUUUAU | 887 | 1228-1248 | AUAAACTUUGGGACAUGGCGCUG | 1161 | 1226-1248 |
| AD-392857 | CUUGCCCGAGAUCCUGUUAAA | 888 | 1269-1289 | UUUAACAGGAUCUCGGGCAAGAG | 1162 | 1267-1289 |
| AD-392851 | UUGCCCGAGAUCCUGUUAAAU | 889 | 1270-1290 | AUUUAACAGGAUCUCGGGCAAGA | 1163 | 1268-1290 |
| AD-392811 | UGCCCGAGAUCCUGUUAAACU | 890 | 1271-1291 | AGUUUAACAGGAUCUCGGGCAAG | 1164 | 1269-1291 |
| AD-392910 | GAUCCUGUUAAACUUCCUACA | 891 | 1278-1298 | UGUAGGAAGUUUAACAGGAUCUC | 1165 | 1276-1298 |
| AD-392890 | AUCCUGUUAAACUUCCUACAA | 892 | 1279-1299 | UUGUAGGAAGUUUAACAGGAUCU | 1166 | 1277-1299 |
| AD-392911 | CUGCUUCAGAAAGAGCAAAAU | 893 | 1893-1913 | AUUUUGCUCUUUCUGAAGCAGCU | 1167 | 1891-1913 |
| AD-392912 | CAGAAAGAGCAAAACUAUUCA | 894 | 1899-1919 | UGAAUAGUUUUGCUCUUUCUGAA | 1168 | 1897-1919 |
| AD-392778 | GAGCAAAACUAUUCAGAUGAU | 895 | 1905-1925 | AUCAUCTGAAUAGUUUUGCUCUU | 1169 | 1903-1925 |
| AD-392727 | AAAACUAUUCAGAUGACGUCU | 896 | 1909-1929 | AGACGUCAUCUGAAUAGUUUUGC | 1170 | 1907-1929 |
| AD-392728 | AAACUAUUCAGAUGACGUCUU | 897 | 1910-1930 | AAGACGTCAUCUGAAUAGUUUUG | 1171 | 1908-1930 |
| AD-392891 | ACUAUUCAGAUGACGUCUUGU | 898 | 1912-1932 | ACAAGACGUCAUCUGAAUAGUUU | 1172 | 1910-1932 |
| AD-392822 | UUCAGAUGACGUCUUGGCCAA | 899 | 1916-1936 | UUGGCCAAGACGUCAUCUGAAUA | 1173 | 1914-1936 |
| AD-392749 | GGCCAACAUGAUUAGUGAACU | 900 | 1931-1951 | AGUUCACUAAUCAUGUUGGCCAA | 1174 | 1929-1951 |
| AD-392794 | CCAACAUGAUUAGUGAACCAA | 901 | 1933-1953 | UUGGUUCACUAAUCAUGUUGGCC | 1175 | 1931-1953 |
| AD-392795 | AUGAUUAGUGAACCAAGGAUU | 902 | 1938-1958 | AAUCCUTGGUUCACUAAUCAUGU | 1176 | 1936-1958 |
| AD-392812 | AUUAGUGAACCAAGGAUCAGU | 903 | 1941-1961 | ACUGAUCCUUGGUUCACUAAUCA | 1177 | 1939-1961 |
| AD-392796 | UUAGUGAACCAAGGAUCAGUU | 904 | 1942-1962 | AACUGATCCUUGGUUCACUAAUC | 1178 | 1940-1962 |
| AD-392779 | AGUGAACCAAGGAUCAGUUAU | 905 | 1944-1964 | AUAACUGAUCCUUGGUUCACUAA | 1179 | 1942-1964 |
| AD-392780 | UGAACCAAGGAUCAGUUACGU | 906 | 1946-1966 | ACGUAACUGAUCCUUGGUUCACU | 1180 | 1944-1966 |
| AD-392813 | GAACCAAGGAUCAGUUACGGA | 907 | 1947-1967 | UCCGUAACUGAUCCUUGGUUCAC | 1181 | 1945-1967 |
| AD-392797 | AACCAAGGAUCAGUUACGGAA | 908 | 1948-1968 | UUCCGUAACUGAUCCUUGGUUCA | 1182 | 1946-1968 |
| AD-392761 | CAAGGAUCAGUUACGGAAACU | 909 | 1951-1971 | AGUUUCCGUAACUGAUCCUUGGU | 1183 | 1949-1971 |
| AD-392814 | AAGGAUCAGUUACGGAAACGA | 910 | 1952-1972 | UCGUUUCCGUAACUGAUCCUUGG | 1184 | 1950-1972 |
| AD-392742 | GGAUCAGUUACGGAAACGAUU | 911 | 1954-1974 | AAUCGUTUCCGUAACUGAUCCUU | 1185 | 1952-1974 |
| AD-392750 | GAUCAGUUACGGAAACGAUGU | 912 | 1955-1975 | ACAUCGTUUCCGUAACUGAUCCU | 1186 | 1953-1975 |
| AD-392823 | AUCAGUUACGGAAACGAUGCU | 913 | 1956-1976 | AGCAUCGUUUCCGUAACUGAUCC | 1187 | 1954-1976 |
| AD-392789 | UCAGUUACGGAAACGAUGCUU | 914 | 1957-1977 | AAGCAUCGUUUCCGUAACUGAUC | 1188 | 1955-1977 |
| AD-392781 | CAGUUACGGAAACGAUGCUCU | 915 | 1958-1978 | AGAGCATCGUUUCCGUAACUGAU | 1189 | 1956-1978 |
| AD-392798 | GUUACGGAAACGAUGCUCUCA | 916 | 1960-1980 | UGAGAGCAUCGUUUCCGUAACUG | 1190 | 1958-1980 |
| AD-392751 | UACGGAAACGAUGCUCUCAUU | 917 | 1962-1982 | AAUGAGAGCAUCGUUUCCGUAAC | 1191 | 1960-1982 |
| AD-392858 | CUCAUGCCAUCUUUGACCGAA | 918 | 1977-1997 | UUCGGUCAAAGAUGGCAUGAGAG | 1192 | 1975-1997 |
| AD-392844 | UCAUGCCAUCUUUGACCGAAA | 919 | 1978-1998 | UUUCGGTCAAAGAUGGCAUGAGA | 1193 | 1976-1998 |
| AD-392842 | CAUGCCAUCUUUGACCGAAAU | 920 | 1979-1999 | AUUUCGGUCAAAGAUGGCAUGAG | 1194 | 1977-1999 |
| AD-392848 | AUGCCAUCUUUGACCGAAACU | 921 | 1980-2000 | AGUUUCGGUCAAAGAUGGCAUGA | 1195 | 1978-2000 |
| AD-392838 | GCCAUCUUUGACCGAAACGAA | 922 | 1982-2002 | UUCGUUTCGGUCAAAGAUGGCAU | 1196 | 1980-2002 |
| AD-392839 | CCAUCUUUGACCGAAACGAAA | 923 | 1983-2003 | UUUCGUTUCGGUCAAAGAUGGCA | 1197 | 1981-2003 |
| AD-392734 | UCUUUGACCGAAACGAAAACU | 924 | 1986-2006 | AGUUUUCGUUUCGGUCAAAGAUG | 1198 | 1984-2006 |
| AD-392790 | CUUCCCGUGAAUGGAGAGUUU | 925 | 2019-2039 | AAACUCTCCAUUCACGGGAAGGA | 1199 | 2017-2039 |
| AD-392815 | CAACACAGAAAACGAAGUUGA | 926 | 2093-2113 | UCAACUTCGUUUUCUGUGUUGGC | 1200 | 2091-2113 |
| AD-392762 | AGGUUCUGGGUUGACAAAUAU | 927 | 2162-2182 | AUAUUUGUCAACCCAGAACCUGG | 1201 | 2160-2182 |
| AD-392735 | GUUCUGGGUUGACAAAUAUCA | 928 | 2164-2184 | UGAUAUTUGUCAACCCAGAACCU | 1202 | 2162-2184 |
| AD-392743 | CUGGGUUGACAAAUAUCAAGA | 929 | 2167-2187 | UCUUGATAUUUGUCAACCCAGAA | 1203 | 2165-2187 |
| AD-392736 | UGGGUUGACAAAUAUCAAGAU | 930 | 2168-2188 | AUCUUGAUAUUUGUCAACCCAGA | 1204 | 2166-2188 |
| AD-392824 | UGGAUGCAGAAUUCCGACAUU | 931 | 2212-2232 | AAUGUCGGAAUUCUGCAUCCAUC | 1205 | 2210-2232 |
| AD-392799 | GAUGCAGAAUUCCGACAUGAU | 932 | 2214-2234 | AUCAUGTCGGAAUUCUGCAUCCA | 1206 | 2212-2234 |
| AD-392971 | CAGGAUAUGAAGUUCAUCAUU | 933 | 2236-2256 | AAUGAUGAACUUCAUAUCCUGAG | 1207 | 2234-2256 |
| AD-392913 | UAUGAAGUUCAUCAUCAAAAA | 934 | 2241-2261 | UUUUUGAUGAUGAACUUCAUAUC | 1208 | 2239-2261 |
| AD-392892 | GUUCAUCAUCAAAAAUUGGUU | 935 | 2247-2267 | AACCAATUUUUGAUGAUGAACUU | 1209 | 2245-2267 |
| AD-392914 | CAUCAUCAAAAAUUGGUGUUU | 936 | 2250-2270 | AAACACCAAUUUUUGAUGAUGAA | 1210 | 2248-2270 |
| AD-392860 | CAUCAAAAAUUGGUGUUCUUU | 937 | 2253-2273 | AAAGAACACCAAUUUUUGAUGAU | 1211 | 2251-2273 |
| AD-392875 | AUCAAAAAUUGGUGUUCUUUG | 938 | 2254-2274 | CAAAGAACACCAAUUUUUGAUGA | 1212 | 2252-2274 |
| AD-392915 | UCAAAAAUUGGUGUUCUUUGU | 939 | 2255-2275 | ACAAAGAACACCAAUUUUUGAUG | 1213 | 2253-2275 |
| AD-392782 | AGAAGAUGUGGGUUCAAACAA | 940 | 2276-2296 | UUGUUUGAACCCACAUCUUCUGC | 1214 | 2274-2296 |
| AD-392763 | AAGAUGUGGGUUCAAACAAAU | 941 | 2278-2298 | AUUUGUTUGAACCCACAUCUUCU | 1215 | 2276-2298 |
| AD-392816 | UGGGUUCAAACAAAGGUGCAA | 942 | 2284-2304 | UUGCACCUUUGUUUGAACCCACA | 1216 | 2282-2304 |
| AD-392704 | GGUUCAAACAAAGGUGCAAUU | 943 | 2286-2306 | AAUUGCACCUUUGUUUGAACCCA | 1217 | 2284-2306 |
| AD-392854 | GUCAUAGCGACAGUGAUCGUU | 944 | 2331-2351 | AACGAUCACUGUCGCUAUGACAA | 1218 | 2329-2351 |
| AD-392856 | AUAGCGACAGUGAUCGUCAUU | 945 | 2334-2354 | AAUGACGAUCACUGUCGCUAUGA | 1219 | 2332-2354 |
| AD-392817 | CAGUGAUCGUCAUCACCUUGU | 946 | 2341-2361 | ACAAGGTGAUGACGAUCACUGUC | 1220 | 2339-2361 |
| AD-392764 | CUGAAGAAGAAACAGUACACA | 947 | 2367-2387 | UGUGUACUGUUUCUUCUUCAGCA | 1221 | 2365-2387 |
| AD-392845 | CAGUACACAUCCAUUCAUCAU | 948 | 2379-2399 | AUGAUGAAUGGAUGUGUACUGUU | 1222 | 2377-2399 |
| AD-392825 | GUCCAAGAUGCAGCAGAACGU | 949 | 2447-2467 | ACGUUCTGCUGCAUCUUGGACAG | 1223 | 2445-2467 |
| AD-392849 | GAACGGCUACGAAAAUCCAAU | 950 | 2462-2482 | AUUGGATUUUCGUAGCCGUUCUG | 1224 | 2460-2482 |
| AD-392846 | AACGGCUACGAAAAUCCAACU | 951 | 2463-2483 | AGUUGGAUUUUCGUAGCCGUUCU | 1225 | 2461-2483 |
| AD-392859 | ACGGCUACGAAAAUCCAACCU | 952 | 2464-2484 | AGGUUGGAUUUUCGUAGCCGUUC | 1226 | 2462-2484 |
| AD-392843 | GGCUACGAAAAUCCAACCUAU | 953 | 2466-2486 | AUAGGUTGGAUUUUCGUAGCCGU | 1227 | 2464-2486 |
| AD-392855 | GCUACGAAAAUCCAACCUACA | 954 | 2467-2487 | UGUAGGTUGGAUUUUCGUAGCCG | 1228 | 2465-2487 |
| AD-392840 | CUACGAAAAUCCAACCUACAA | 955 | 2468-2488 | UUGUAGGUUGGAUUUUCGUAGCC | 1229 | 2466-2488 |
| AD-392835 | UACGAAAAUCCAACCUACAAU | 956 | 2469-2489 | AUUGUAGGUUGGAUUUUCGUAGC | 1230 | 2467-2489 |
| AD-392729 | ACGAAAAUCCAACCUACAAGU | 957 | 2470-2490 | ACUUGUAGGUUGGAUUUUCGUAG | 1231 | 2468-2490 |
| AD-392916 | AAAAUCCAACCUACAAGUUCU | 958 | 2473-2493 | AGAACUTGUAGGUUGGAUUUUCG | 1232 | 2471-2493 |
| AD-392876 | AAAUCCAACCUACAAGUUCUU | 959 | 2474-2494 | AAGAACTUGUAGGUUGGAUUUUC | 1233 | 2472-2494 |
| AD-392861 | AUCCAACCUACAAGUUCUUUG | 960 | 2476-2496 | CAAAGAACUUGUAGGUUGGAUUU | 1234 | 2474-2496 |
| AD-392863 | UCCAACCUACAAGUUCUUUGA | 961 | 2477-2497 | UCAAAGAACUUGUAGGUUGGAUU | 1235 | 2475-2497 |
| AD-392917 | CCAACCUACAAGUUCUUUGAU | 962 | 2478-2498 | AUCAAAGAACUUGUAGGUUGGAU | 1236 | 2476-2498 |
| AD-392783 | CCUCUGAAGUUGGACAGCAAA | 963 | 2530-2550 | UUUGCUGUCCAACUUCAGAGGCU | 1237 | 2528-2550 |
| AD-392765 | AAGUUGGACAGCAAAACCAUU | 964 | 2536-2556 | AAUGGUTUUGCUGUCCAACUUCA | 1238 | 2534-2556 |
| AD-392791 | AGUUGGACAGCAAAACCAUUU | 965 | 2537-2557 | AAAUGGTUUUGCUGUCCAACUUC | 1239 | 2535-2557 |
| AD-392800 | UUGGACAGCAAAACCAUUGCU | 966 | 2539-2559 | AGCAAUGGUUUUGCUGUCCAACU | 1240 | 2537-2559 |
| AD-392711 | GCAAAACCAUUGCUUCACUAU | 967 | 2546-2566 | AUAGUGAAGCAAUGGUUUUGCUG | 1241 | 2544-2566 |
| AD-392801 | AAACCAUUGCUUCACUACCCA | 968 | 2549-2569 | UGGGUAGUGAAGCAAUGGUUUUG | 1242 | 2547-2569 |
| AD-392826 | UACCCAUCGGUGUCCAUUUAU | 969 | 2564-2584 | AUAAAUGGACACCGAUGGGUAGU | 1243 | 2562-2584 |
| AD-392818 | ACCCAUCGGUGUCCAUUUAUA | 970 | 2565-2585 | UAUAAATGGACACCGAUGGGUAG | 1244 | 2563-2585 |
| AD-392792 | CCCAUCGGUGUCCAUUUAUAU | 971 | 2566-2586 | AUAUAAAUGGACACCGAUGGGUA | 1245 | 2564-2586 |
| AD-392802 | CCAUCGGUGUCCAUUUAUAGA | 972 | 2567-2587 | UCUAUAAAUGGACACCGAUGGGU | 1246 | 2565-2587 |
| AD-392766 | AUCGGUGUCCAUUUAUAGAAU | 973 | 2569-2589 | AUUCUATAAAUGGACACCGAUGG | 1247 | 2567-2589 |
| AD-392767 | UCGGUGUCCAUUUAUAGAAUA | 974 | 2570-2590 | UAUUCUAUAAAUGGACACCGAUG | 1248 | 2568-2590 |
| AD-392834 | ACCCGUUUUAUGAUUUACUCA | 975 | 2607-2627 | UGAGUAAAUCAUAAAACGGGUUU | 1249 | 2605-2627 |
| AD-392974 | CCCGUUUUAUGAUUUACUCAU | 976 | 2608-2628 | AUGAGUAAAUCAUAAAACGGGUU | 1250 | 2606-2628 |
| AD-392784 | UUAUGAUUUACUCAUUAUCGU | 977 | 2614-2634 | ACGAUAAUGAGUAAAUCAUAAAA | 1251 | 2612-2634 |
| AD-392744 | AUGAUUUACUCAUUAUCGCCU | 978 | 2616-2636 | AGGCGATAAUGAGUAAAUCAUAA | 1252 | 2614-2636 |
| AD-392752 | UGAUUUACUCAUUAUCGCCUU | 979 | 2617-2637 | AAGGCGAUAAUGAGUAAAUCAUA | 1253 | 2615-2637 |
| AD-392737 | GAUUUACUCAUUAUCGCCUUU | 980 | 2618-2638 | AAAGGCGAUAAUGAGUAAAUCAU | 1254 | 2616-2638 |
| AD-392712 | AUUUACUCAUUAUCGCCUUUU | 981 | 2619-2639 | AAAAGGCGAUAAUGAGUAAAUCA | 1255 | 2617-2639 |
| AD-392705 | UUUACUCAUUAUCGCCUUUUG | 982 | 2620-2640 | CAAAAGGCGAUAAUGAGUAAAUC | 1256 | 2618-2640 |
| AD-392713 | UACUCAUUAUCGCCUUUUGAU | 983 | 2622-2642 | AUCAAAAGGCGAUAAUGAGUAAA | 1257 | 2620-2642 |
| AD-392918 | ACUCAUUAUCGCCUUUUGACA | 984 | 2623-2643 | UGUCAAAAGGCGAUAAUGAGUAA | 1258 | 2621-2643 |
| AD-392919 | CUCAUUAUCGCCUUUUGACAU | 985 | 2624-2644 | AUGUCAAAAGGCGAUAAUGAGUA | 1259 | 2622-2644 |
| AD-392803 | UUAUCGCCUUUUGACAGCUGU | 986 | 2628-2648 | ACAGCUGUCAAAAGGCGAUAAUG | 1260 | 2626-2648 |
| AD-392804 | AUCGCCUUUUGACAGCUGUGU | 987 | 2630-2650 | ACACAGCUGUCAAAAGGCGAUAA | 1261 | 2628-2650 |
| AD-392827 | UUUUGACAGCUGUGCUGUAAU | 988 | 2636-2656 | AUUACAGCACAGCUGUCAAAAGG | 1262 | 2634-2656 |
| AD-392828 | UUGACAGCUGUGCUGUAACAU | 989 | 2638-2658 | AUGUUACAGCACAGCUGUCAAAA | 1263 | 2636-2658 |
| AD-392785 | ACAGCUGUGCUGUAACACAAU | 990 | 2641-2661 | AUUGUGTUACAGCACAGCUGUCA | 1264 | 2639-2661 |
| AD-392829 | AGCUGUGCUGUAACACAAGUA | 991 | 2643-2663 | UACUUGTGUUACAGCACAGCUGU | 1265 | 2641-2663 |
| AD-392920 | UGUGCUGUAACACAAGUAGAU | 992 | 2646-2666 | AUCUACTUGUGUUACAGCACAGC | 1266 | 2644-2666 |
| AD-392921 | GUGCUGUAACACAAGUAGAUU | 993 | 2647-2667 | AAUCUACUUGUGUUACAGCACAG | 1267 | 2645-2667 |
| AD-392768 | GCUGUAACACAAGUAGAUGCU | 994 | 2649-2669 | AGCAUCTACUUGUGUUACAGCAC | 1268 | 2647-2669 |
| AD-392805 | ACACAAGUAGAUGCCUGAACU | 995 | 2655-2675 | AGUUCAGGCAUCUACUUGUGUUA | 1269 | 2653-2675 |
| AD-392769 | AAGUAGAUGCCUGAACUUGAA | 996 | 2659-2679 | UUCAAGTUCAGGCAUCUACUUGU | 1270 | 2657-2679 |
| AD-392753 | GUAGAUGCCUGAACUUGAAUU | 997 | 2661-2681 | AAUUCAAGUUCAGGCAUCUACUU | 1271 | 2659-2681 |
| AD-392714 | UGCCUGAACUUGAAUUAAUCU | 998 | 2666-2686 | AGAUUAAUUCAAGUUCAGGCAUC | 1272 | 2664-2686 |
| AD-392703 | CCUGAACUUGAAUUAAUCCAU | 999 | 2668-2688 | AUGGAUTAAUUCAAGUUCAGGCA | 1273 | 2666-2688 |
| AD-392715 | CUGAACUUGAAUUAAUCCACA | 1000 | 2669-2689 | UGUGGATUAAUUCAAGUUCAGGC | 1274 | 2667-2689 |
| AD-392841 | AUCCACACAUCAGUAAUGUAU | 1001 | 2683-2703 | AUACAUTACUGAUGUGUGGAUUA | 1275 | 2681-2703 |
| AD-392836 | UCCACACAUCAGUAAUGUAUU | 1002 | 2684-2704 | AAUACATUACUGAUGUGUGGAUU | 1276 | 2682-2704 |
| AD-392966 | CCACACAUCAGUAAUGUAUUU | 1003 | 2685-2705 | AAAUACAUUACUGAUGUGUGGAU | 1277 | 2683-2705 |
| AD-392832 | CACACAUCAGUAAUGUAUUCU | 1004 | 2686-2706 | AGAAUACAUUACUGAUGUGUGGA | 1278 | 2684-2706 |
| AD-392972 | ACACAUCAGUAAUGUAUUCUA | 1005 | 2687-2707 | UAGAAUACAUUACUGAUGUGUGG | 1279 | 2685-2707 |
| AD-392961 | UGUAUUCUAUCUCUCUUUACA | 1006 | 2699-2719 | UGUAAAGAGAGAUAGAAUACAUU | 1280 | 2697-2719 |
| AD-392967 | CUAUCUCUCUUUACAUUUUGU | 1007 | 2705-2725 | ACAAAATGUAAAGAGAGAUAGAA | 1281 | 2703-2725 |
| AD-392893 | UAUCUCUCUUUACAUUUUGGU | 1008 | 2706-2726 | ACCAAAAUGUAAAGAGAGAUAGA | 1282 | 2704-2726 |
| AD-392894 | AUCUCUCUUUACAUUUUGGUU | 1009 | 2707-2727 | AACCAAAAUGUAAAGAGAGAUAG | 1283 | 2705-2727 |
| AD-392864 | UCUCUCUUUACAUUUUGGUCU | 1010 | 2708-2728 | AGACCAAAAUGUAAAGAGAGAUA | 1284 | 2706-2728 |
| AD-392865 | CUCUCUUUACAUUUUGGUCUU | 1011 | 2709-2729 | AAGACCAAAAUGUAAAGAGAGAU | 1285 | 2707-2729 |
| AD-392922 | UCUUUACAUUUUGGUCUCUAU | 1012 | 2712-2732 | AUAGAGACCAAAAUGUAAAGAGA | 1286 | 2710-2732 |
| AD-392833 | UGGUCUCUAUACUACAUUAUU | 1013 | 2723-2743 | AAUAAUGUAGUAUAGAGACCAAA | 1287 | 2721-2743 |
| AD-392968 | GGUCUCUAUACUACAUUAUUA | 1014 | 2724-2744 | UAAUAATGUAGUAUAGAGACCAA | 1288 | 2722-2744 |
| AD-392962 | GUCUCUAUACUACAUUAUUAA | 1015 | 2725-2745 | UUAAUAAUGUAGUAUAGAGACCA | 1289 | 2723-2745 |
| AD-392963 | UCUCUAUACUACAUUAUUAAU | 1016 | 2726-2746 | AUUAAUAAUGUAGUAUAGAGACC | 1290 | 2724-2746 |
| AD-392964 | CUCUAUACUACAUUAUUAAUU | 1017 | 2727-2747 | AAUUAATAAUGUAGUAUAGAGAC | 1291 | 2725-2747 |
| AD-392969 | UCUAUACUACAUUAUUAAUGU | 1018 | 2728-2748 | ACAUUAAUAAUGUAGUAUAGAGA | 1292 | 2726-2748 |
| AD-392973 | CUAUACUACAUUAUUAAUGGU | 1019 | 2729-2749 | ACCAUUAAUAAUGUAGUAUAGAG | 1293 | 2727-2749 |
| AD-392923 | AUGGGUUUUGUGUACUGUAAA | 1020 | 2745-2765 | UUUACAGUACACAAAACCCAUUA | 1294 | 2743-2765 |
| AD-392866 | UUUGUGUACUGUAAAGAAUUU | 1021 | 2751-2771 | AAAUUCTUUACAGUACACAAAAC | 1295 | 2749-2771 |
| AD-392924 | UUGUGUACUGUAAAGAAUUUA | 1022 | 2752-2772 | UAAAUUCUUUACAGUACACAAAA | 1296 | 2750-2772 |
| AD-392895 | UGUGUACUGUAAAGAAUUUAU | 1023 | 2753-2773 | AUAAAUTCUUUACAGUACACAAA | 1297 | 2751-2773 |
| AD-392867 | GUGUACUGUAAAGAAUUUAGU | 1024 | 2754-2774 | ACUAAATUCUUUACAGUACACAA | 1298 | 2752-2774 |
| AD-392877 | GUACUGUAAAGAAUUUAGCUU | 1025 | 2756-2776 | AAGCUAAAUUCUUUACAGUACAC | 1299 | 2754-2776 |
| AD-392707 | AUUUAGCUGUAUCAAACUAGU | 1026 | 2768-2788 | ACUAGUTUGAUACAGCUAAAUUC | 1300 | 2766-2788 |
| AD-392716 | UUUAGCUGUAUCAAACUAGUU | 1027 | 2769-2789 | AACUAGTUUGAUACAGCUAAAUU | 1301 | 2767-2789 |
| AD-392925 | GCUGUAUCAAACUAGUGCAUU | 1028 | 2773-2793 | AAUGCACUAGUUUGAUACAGCUA | 1302 | 2771-2793 |
| AD-392926 | CUAGUGCAUGAAUAGAUUCUU | 1029 | 2784-2804 | AAGAAUCUAUUCAUGCACUAGUU | 1303 | 2782-2804 |
| AD-392927 | UAGUGCAUGAAUAGAUUCUCU | 1030 | 2785-2805 | AGAGAATCUAUUCAUGCACUAGU | 1304 | 2783-2805 |
| AD-392717 | GAAUAGAUUCUCUCCUGAUUA | 1031 | 2793-2813 | UAAUCAGGAGAGAAUCUAUUCAU | 1305 | 2791-2813 |
| AD-392928 | CUCUCCUGAUUAUUUAUCACA | 1032 | 2802-2822 | UGUGAUAAAUAAUCAGGAGAGAA | 1306 | 2800-2822 |
| AD-392700 | UCUCCUGAUUAUUUAUCACAU | 1033 | 2803-2823 | AUGUGATAAAUAAUCAGGAGAGA | 1307 | 2801-2823 |
| AD-392878 | CUCCUGAUUAUUUAUCACAUA | 1034 | 2804-2824 | UAUGUGAUAAAUAAUCAGGAGAG | 1308 | 2802-2824 |
| AD-392718 | UCCUGAUUAUUUAUCACAUAU | 1035 | 2805-2825 | AUAUGUGAUAAAUAAUCAGGAGA | 1309 | 2803-2825 |
| AD-392929 | CCUGAUUAUUUAUCACAUAGU | 1036 | 2806-2826 | ACUAUGTGAUAAAUAAUCAGGAG | 1310 | 2804-2826 |
| AD-392879 | GCCAGUUGUAUAUUAUUCUUU | 1037 | 2833-2853 | AAAGAATAAUAUACAACUGGCUA | 1311 | 2831-2853 |
| AD-392754 | UUGUAUAUUAUUCUUGUGGUU | 1038 | 2838-2858 | AACCACAAGAAUAAUAUACAACU | 1312 | 2836-2858 |
| AD-392819 | UCUUGUGGUUUGUGACCCAAU | 1039 | 2849-2869 | AUUGGGTCACAAACCACAAGAAU | 1313 | 2847-2869 |
| AD-392745 | CUUGUGGUUUGUGACCCAAUU | 1040 | 2850-2870 | AAUUGGGUCACAAACCACAAGAA | 1314 | 2848-2870 |
| AD-392770 | UUGUGGUUUGUGACCCAAUUA | 1041 | 2851-2871 | UAAUUGGGUCACAAACCACAAGA | 1315 | 2849-2871 |
| AD-392806 | UGUGGUUUGUGACCCAAUUAA | 1042 | 2852-2872 | UUAAUUGGGUCACAAACCACAAG | 1316 | 2850-2872 |
| AD-392771 | GUUUGUGACCCAAUUAAGUCU | 1043 | 2856-2876 | AGACUUAAUUGGGUCACAAACCA | 1317 | 2854-2876 |
| AD-392820 | UUUGUGACCCAAUUAAGUCCU | 1044 | 2857-2877 | AGGACUTAAUUGGGUCACAAACC | 1318 | 2855-2877 |
| AD-392821 | UUGUGACCCAAUUAAGUCCUA | 1045 | 2858-2878 | UAGGACTUAAUUGGGUCACAAAC | 1319 | 2856-2878 |
| AD-392786 | UGUGACCCAAUUAAGUCCUAU | 1046 | 2859-2879 | AUAGGACUUAAUUGGGUCACAAA | 1320 | 2857-2879 |
| AD-392772 | GUGACCCAAUUAAGUCCUACU | 1047 | 2860-2880 | AGUAGGACUUAAUUGGGUCACAA | 1321 | 2858-2880 |
| AD-392699 | GACCCAAUUAAGUCCUACUUU | 1048 | 2862-2882 | AAAGUAGGACUUAAUUGGGUCAC | 1322 | 2860-2882 |
| AD-392868 | ACCCAAUUAAGUCCUACUUUA | 1049 | 2863-2883 | UAAAGUAGGACUUAAUUGGGUCA | 1323 | 2861-2883 |
| AD-392719 | CCCAAUUAAGUCCUACUUUAU | 1050 | 2864-2884 | AUAAAGTAGGACUUAAUUGGGUC | 1324 | 2862-2884 |
| AD-392880 | AAUUAAGUCCUACUUUACAUA | 1051 | 2867-2887 | UAUGUAAAGUAGGACUUAAUUGG | 1325 | 2865-2887 |
| AD-392930 | UAAGUCCUACUUUACAUAUGU | 1052 | 2870-2890 | ACAUAUGUAAAGUAGGACUUAAU | 1326 | 2868-2890 |
| AD-392931 | AGUCCUACUUUACAUAUGCUU | 1053 | 2872-2892 | AAGCAUAUGUAAAGUAGGACUUA | 1327 | 2870-2892 |
| AD-392932 | GUCCUACUUUACAUAUGCUUU | 1054 | 2873-2893 | AAAGCATAUGUAAAGUAGGACUU | 1328 | 2871-2893 |
| AD-392869 | UCCUACUUUACAUAUGCUUUA | 1055 | 2874-2894 | UAAAGCAUAUGUAAAGUAGGACU | 1329 | 2872-2894 |
| AD-392870 | CCUACUUUACAUAUGCUUUAA | 1056 | 2875-2895 | UUAAAGCAUAUGUAAAGUAGGAC | 1330 | 2873-2895 |
| AD-392896 | CUACUUUACAUAUGCUUUAAU | 1057 | 2876-2896 | AUUAAAGCAUAUGUAAAGUAGGA | 1331 | 2874-2896 |
| AD-392787 | UACAUAUGCUUUAAGAAUCGA | 1058 | 2882-2902 | UCGAUUCUUAAAGCAUAUGUAAA | 1332 | 2880-2902 |
| AD-392720 | CAUAUGCUUUAAGAAUCGAUU | 1059 | 2884-2904 | AAUCGATUCUUAAAGCAUAUGUA | 1333 | 2882-2904 |
| AD-392746 | AUAUGCUUUAAGAAUCGAUGU | 1060 | 2885-2905 | ACAUCGAUUCUUAAAGCAUAUGU | 1334 | 2883-2905 |
| AD-392773 | UAUGCUUUAAGAAUCGAUGGU | 1061 | 2886-2906 | ACCAUCGAUUCUUAAAGCAUAUG | 1335 | 2884-2906 |
| AD-392807 | GGGAUGCUUCAUGUGAACGUU | 1062 | 2906-2926 | AACGUUCACAUGAAGCAUCCCCC | 1336 | 2904-2926 |
| AD-392730 | UGCUUCUCUUGCCUAAGUAUU | 1063 | 2937-2957 | AAUACUTAGGCAAGAGAAGCAGC | 1337 | 2935-2957 |
| AD-392721 | CUUCUCUUGCCUAAGUAUUCU | 1064 | 2939-2959 | AGAAUACUUAGGCAAGAGAAGCA | 1338 | 2937-2959 |
| AD-392933 | UUCUCUUGCCUAAGUAUUCCU | 1065 | 2940-2960 | AGGAAUACUUAGGCAAGAGAAGC | 1339 | 2938-2960 |
| AD-392934 | CUCUUGCCUAAGUAUUCCUUU | 1066 | 2942-2962 | AAAGGAAUACUUAGGCAAGAGAA | 1340 | 2940-2962 |
| AD-392881 | CUUGCCUAAGUAUUCCUUUCU | 1067 | 2944-2964 | AGAAAGGAAUACUUAGGCAAGAG | 1341 | 2942-2964 |
| AD-392897 | UGCCUAAGUAUUCCUUUCCUU | 1068 | 2946-2966 | AAGGAAAGGAAUACUUAGGCAAG | 1342 | 2944-2966 |
| AD-392898 | AAGUAUUCCUUUCCUGAUCAU | 1069 | 2951-2971 | AUGAUCAGGAAAGGAAUACUUAG | 1343 | 2949-2971 |
| AD-392708 | AGUAUUCCUUUCCUGAUCACU | 1070 | 2952-2972 | AGUGAUCAGGAAAGGAAUACUUA | 1344 | 2950-2972 |
| AD-392899 | GUAUUCCUUUCCUGAUCACUA | 1071 | 2953-2973 | UAGUGATCAGGAAAGGAAUACUU | 1345 | 2951-2973 |
| AD-392935 | UAUUCCUUUCCUGAUCACUAU | 1072 | 2954-2974 | AUAGUGAUCAGGAAAGGAAUACU | 1346 | 2952-2974 |
| AD-392882 | AUUCCUUUCCUGAUCACUAUU | 1073 | 2955-2975 | AAUAGUGAUCAGGAAAGGAAUAC | 1347 | 2953-2975 |
| AD-392738 | UCCUUUCCUGAUCACUAUGCA | 1074 | 2957-2977 | UGCAUAGUGAUCAGGAAAGGAAU | 1348 | 2955-2977 |
| AD-392739 | CUUUCCUGAUCACUAUGCAUU | 1075 | 2959-2979 | AAUGCATAGUGAUCAGGAAAGGA | 1349 | 2957-2979 |
| AD-392936 | UUUCCUGAUCACUAUGCAUUU | 1076 | 2960-2980 | AAAUGCAUAGUGAUCAGGAAAGG | 1350 | 2958-2980 |
| AD-392900 | UUCCUGAUCACUAUGCAUUUU | 1077 | 2961-2981 | AAAAUGCAUAGUGAUCAGGAAAG | 1351 | 2959-2981 |
| AD-392901 | CUGAUCACUAUGCAUUUUAAA | 1078 | 2964-2984 | UUUAAAAUGCAUAGUGAUCAGGA | 1352 | 2962-2984 |
| AD-392937 | CACUAUGCAUUUUAAAGUUAA | 1079 | 2969-2989 | UUAACUTUAAAAUGCAUAGUGAU | 1353 | 2967-2989 |
| AD-392883 | ACUAUGCAUUUUAAAGUUAAA | 1080 | 2970-2990 | UUUAACTUUAAAAUGCAUAGUGA | 1354 | 2968-2990 |
| AD-392975 | UUCCAUGACUGCAUUUUACUU | 1081 | 3029-3049 | AAGUAAAAUGCAGUCAUGGAAAA | 1355 | 3027-3049 |
| AD-392938 | CUGCAUUUUACUGUACAGAUU | 1082 | 3037-3057 | AAUCUGTACAGUAAAAUGCAGUC | 1356 | 3035-3057 |
| AD-392755 | AUUGCUGCUUCUGCUAUAUUU | 1083 | 3055-3075 | AAAUAUAGCAGAAGCAGCAAUCU | 1357 | 3053-3075 |
| AD-392939 | UUCUGCUAUAUUUGUGAUAUA | 1084 | 3063-3083 | UAUAUCACAAAUAUAGCAGAAGC | 1358 | 3061-3083 |
| AD-392940 | UCUGCUAUAUUUGUGAUAUAU | 1085 | 3064-3084 | AUAUAUCACAAAUAUAGCAGAAG | 1359 | 3062-3084 |
| AD-392756 | UGCUAUAUUUGUGAUAUAGGA | 1086 | 3066-3086 | UCCUAUAUCACAAAUAUAGCAGA | 1360 | 3064-3086 |
| AD-392774 | UUUGUGAUAUAGGAAUUAAGA | 1087 | 3073-3093 | UCUUAATUCCUAUAUCACAAAUA | 1361 | 3071-3093 |
| AD-392850 | UCUUCGUGCCUGUUUUAUGUU | 1088 | 3111-3131 | AACAUAAAACAGGCACGAAGAAA | 1362 | 3109-3131 |
| AD-392852 | CUUCGUGCCUGUUUUAUGUGU | 1089 | 3112-3132 | ACACAUAAAACAGGCACGAAGAA | 1363 | 3110-3132 |
| AD-392830 | GUUUUAUGUGCACACAUUAGU | 1090 | 3122-3142 | ACUAAUGUGUGCACAUAAAACAG | 1364 | 3120-3142 |
| AD-392808 | UGUGCACACAUUAGGCAUUGA | 1091 | 3128-3148 | UCAAUGCCUAAUGUGUGCACAUA | 1365 | 3126-3148 |
| AD-392793 | UGCACACAUUAGGCAUUGAGA | 1092 | 3130-3150 | UCUCAATGCCUAAUGUGUGCACA | 1366 | 3128-3150 |
| AD-392757 | ACACAUUAGGCAUUGAGACUU | 1093 | 3133-3153 | AAGUCUCAAUGCCUAAUGUGUGC | 1367 | 3131-3153 |
| AD-392747 | UUUGUCCACGUAUCUUUGGGU | 1094 | 3168-3188 | ACCCAAAGAUACGUGGACAAAAA | 1368 | 3166-3188 |
| AD-392902 | CACGUAUCUUUGGGUCUUUGA | 1095 | 3174-3194 | UCAAAGACCCAAAGAUACGUGGA | 1369 | 3172-3194 |
| AD-392941 | ACGUAUCUUUGGGUCUUUGAU | 1096 | 3175-3195 | AUCAAAGACCCAAAGAUACGUGG | 1370 | 3173-3195 |
| AD-392942 | UCUUUGGGUCUUUGAUAAAGA | 1097 | 3180-3200 | UCUUUATCAAAGACCCAAAGAUA | 1371 | 3178-3200 |
| AD-392943 | CUUUGGGUCUUUGAUAAAGAA | 1098 | 3181-3201 | UUCUUUAUCAAAGACCCAAAGAU | 1372 | 3179-3201 |
| AD-392944 | UUGGGUCUUUGAUAAAGAAAA | 1099 | 3183-3203 | UUUUCUTUAUCAAAGACCCAAAG | 1373 | 3181-3203 |
| AD-392903 | UGGGUCUUUGAUAAAGAAAAU | 1100 | 3184-3204 | AUUUUCTUUAUCAAAGACCCAAA | 1374 | 3182-3204 |
| AD-392775 | AAAGAAUCCCUGUUCAUUGUA | 1101 | 3201-3221 | UACAAUGAACAGGGAUUCUUUUC | 1375 | 3199-3221 |
| AD-392758 | AAGAAUCCCUGUUCAUUGUAA | 1102 | 3202-3222 | UUACAATGAACAGGGAUUCUUUU | 1376 | 3200-3222 |
| AD-392945 | AGAAUCCCUGUUCAUUGUAAU | 1103 | 3203-3223 | AUUACAAUGAACAGGGAUUCUUU | 1377 | 3201-3223 |
| AD-392946 | GAAUCCCUGUUCAUUGUAAGU | 1104 | 3204-3224 | ACUUACAAUGAACAGGGAUUCUU | 1378 | 3202-3224 |
| AD-392884 | UGUUCAUUGUAAGCACUUUUA | 1105 | 3211-3231 | UAAAAGTGCUUACAAUGAACAGG | 1379 | 3209-3231 |
| AD-392947 | GUUCAUUGUAAGCACUUUUAU | 1106 | 3212-3232 | AUAAAAGUGCUUACAAUGAACAG | 1380 | 3210-3232 |
| AD-392748 | UCAUUGUAAGCACUUUUACGU | 1107 | 3214-3234 | ACGUAAAAGUGCUUACAAUGAAC | 1381 | 3212-3234 |
| AD-392759 | CAUUGUAAGCACUUUUACGGU | 1108 | 3215-3235 | ACCGUAAAAGUGCUUACAAUGAA | 1382 | 3213-3235 |
| AD-392837 | CUGGUCUUCAAUUACCAAGAA | 1109 | 3258-3278 | UUCUUGGUAAUUGAAGACCAGCA | 1383 | 3256-3278 |
| AD-392970 | GGUCUUCAAUUACCAAGAAUU | 1110 | 3260-3280 | AAUUCUTGGUAAUUGAAGACCAG | 1384 | 3258-3280 |
| AD-392976 | UCUUCAAUUACCAAGAAUUCU | 1111 | 3262-3282 | AGAAUUCUUGGUAAUUGAAGACC | 1385 | 3260-3282 |
| AD-392965 | CUUCAAUUACCAAGAAUUCUU | 1112 | 3263-3283 | AAGAAUTCUUGGUAAUUGAAGAC | 1386 | 3261-3283 |
| AD-392831 | UUCAAUUACCAAGAAUUCUCU | 1113 | 3264-3284 | AGAGAATUCUUGGUAAUUGAAGA | 1387 | 3262-3284 |
| AD-392904 | UCAAUUACCAAGAAUUCUCCA | 1114 | 3265-3285 | UGGAGAAUUCUUGGUAAUUGAAG | 1388 | 3263-3285 |
| AD-392885 | AAUUACCAAGAAUUCUCCAAA | 1115 | 3267-3287 | UUUGGAGAAUUCUUGGUAAUUGA | 1389 | 3265-3287 |
| AD-392886 | UUACCAAGAAUUCUCCAAAAU | 1116 | 3269-3289 | AUUUUGGAGAAUUCUUGGUAAUU | 1390 | 3267-3289 |
| AD-392776 | UGAUUGUACAGAAUCAUUGCU | 1117 | 3304-3324 | AGCAAUGAUUCUGUACAAUCAUC | 1391 | 3302-3324 |
| AD-392887 | UCAUUGCUUAUGACAUGAUCU | 1118 | 3317-3337 | AGAUCATGUCAUAAGCAAUGAUU | 1392 | 3315-3337 |
| AD-392722 | CAUUGCUUAUGACAUGAUCGU | 1119 | 3318-3338 | ACGAUCAUGUCAUAAGCAAUGAU | 1393 | 3316-3338 |
| AD-392740 | AUUGCUUAUGACAUGAUCGCU | 1120 | 3319-3339 | AGCGAUCAUGUCAUAAGCAAUGA | 1394 | 3317-3339 |
| AD-392760 | UUGCUUAUGACAUGAUCGCUU | 1121 | 3320-3340 | AAGCGATCAUGUCAUAAGCAAUG | 1395 | 3318-3340 |
| AD-392731 | UGCUUAUGACAUGAUCGCUUU | 1122 | 3321-3341 | AAAGCGAUCAUGUCAUAAGCAAU | 1396 | 3319-3341 |
| AD-392709 | GCUUAUGACAUGAUCGCUUUC | 1123 | 3322-3342 | GAAAGCGAUCAUGUCAUAAGCAA | 1397 | 3320-3342 |
| AD-392723 | CUUAUGACAUGAUCGCUUUCU | 1124 | 3323-3343 | AGAAAGCGAUCAUGUCAUAAGCA | 1398 | 3321-3343 |
| AD-392948 | UUAUGACAUGAUCGCUUUCUA | 1125 | 3324-3344 | UAGAAAGCGAUCAUGUCAUAAGC | 1399 | 3322-3344 |
| AD-392724 | UAUGACAUGAUCGCUUUCUAU | 1126 | 3325-3345 | AUAGAAAGCGAUCAUGUCAUAAG | 1400 | 3323-3345 |
| AD-392949 | AUGACAUGAUCGCUUUCUACA | 1127 | 3326-3346 | UGUAGAAAGCGAUCAUGUCAUAA | 1401 | 3324-3346 |
| AD-392725 | UGACAUGAUCGCUUUCUACAU | 1128 | 3327-3347 | AUGUAGAAAGCGAUCAUGUCAUA | 1402 | 3325-3347 |
| AD-392950 | CAUGAUCGCUUUCUACACUGU | 1129 | 3330-3350 | ACAGUGTAGAAAGCGAUCAUGUC | 1403 | 3328-3350 |
| AD-392732 | UGAUCGCUUUCUACACUGUAU | 1130 | 3332-3352 | AUACAGTGUAGAAAGCGAUCAUG | 1404 | 3330-3352 |
| AD-392726 | GAUCGCUUUCUACACUGUAUU | 1131 | 3333-3353 | AAUACAGUGUAGAAAGCGAUCAU | 1405 | 3331-3353 |
| AD-392733 | AUCGCUUUCUACACUGUAUUA | 1132 | 3334-3354 | UAAUACAGUGUAGAAAGCGAUCA | 1406 | 3332-3354 |
| AD-392906 | UCGCUUUCUACACUGUAUUAU | 1133 | 3335-3355 | AUAAUACAGUGUAGAAAGCGAUC | 1407 | 3333-3355 |
| AD-392862 | CGCUUUCUACACUGUAUUACA | 1134 | 3336-3356 | UGUAAUACAGUGUAGAAAGCGAU | 1408 | 3334-3356 |
| AD-392951 | CUUUCUACACUGUAUUACAUA | 1135 | 3338-3358 | UAUGUAAUACAGUGUAGAAAGCG | 1409 | 3336-3358 |
| AD-392871 | UUCUACACUGUAUUACAUAAA | 1136 | 3340-3360 | UUUAUGTAAUACAGUGUAGAAAG | 1410 | 3338-3360 |
| AD-392872 | UCUACACUGUAUUACAUAAAU | 1137 | 3341-3361 | AUUUAUGUAAUACAGUGUAGAAA | 1411 | 3339-3361 |
| AD-392952 | GAUUCAAUUUUCUUUAACCAU | 1138 | 3456-3476 | AUGGUUAAAGAAAAUUGAAUCUG | 1412 | 3454-3476 |
| AD-392907 | AUUUUCUUUAACCAGUCUGAA | 1139 | 3462-3482 | UUCAGACUGGUUAAAGAAAAUUG | 1413 | 3460-3482 |
| AD-392953 | UUUCUUUAACCAGUCUGAAGU | 1140 | 3464-3484 | ACUUCAGACUGGUUAAAGAAAAU | 1414 | 3462-3484 |
| AD-392741 | UCUUUAACCAGUCUGAAGUUU | 1141 | 3466-3486 | AAACUUCAGACUGGUUAAAGAAA | 1415 | 3464-3486 |
| AD-392908 | CUUUAACCAGUCUGAAGUUUC | 1142 | 3467-3487 | GAAACUTCAGACUGGUUAAAGAA | 1416 | 3465-3487 |
| AD-392977 | CUGAAGUUUCAUUUAUGAUAU | 1143 | 3478-3498 | AUAUCATAAAUGAAACUUCAGAC | 1417 | 3476-3498 |
| AD-392847 | GAAGUUUCAUUUAUGAUACAA | 1144 | 3480-3500 | UUGUAUCAUAAAUGAAACUUCAG | 1418 | 3478-3500 |
| AD-392809 | AAAUGGAAGUGGCAAUAUAAU | 1145 | 3511-3531 | AUUAUATUGCCACUUCCAUUUUC | 1419 | 3509-3531 |
| AD-392810 | AUGGAAGUGGCAAUAUAAGGU | 1146 | 3513-3533 | ACCUUATAUUGCCACUUCCAUUU | 1420 | 3511-3533 |
| AD-392777 | UGCCUGGACAAACCCUUCUUU | 1147 | 3547-3567 | AAAGAAGGGUUUGUCCAGGCAUG | 1421 | 3545-3567 |
| AD-392960 | UUCUUUUAAGAUGUGUCUUCA | 1148 | 3562-3582 | UGAAGACACAUCUUAAAAGAAGG | 1422 | 3560-3582 |
| AD-392873 | CUUUUAAGAUGUGUCUUCAAU | 1149 | 3564-3584 | AUUGAAGACACAUCUUAAAAGAA | 1423 | 3562-3584 |
| AD-392889 | UUUUAAGAUGUGUCUUCAAUU | 1150 | 3565-3585 | AAUUGAAGACACAUCUUAAAAGA | 1424 | 3563-3585 |
| AD-392954 | UUUAAGAUGUGUCUUCAAUUU | 1151 | 3566-3586 | AAAUUGAAGACACAUCUUAAAAG | 1425 | 3564-3586 |
| AD-392955 | UUAAGAUGUGUCUUCAAUUUG | 1152 | 3567-3587 | CAAAUUGAAGACACAUCUUAAAA | 1426 | 3565-3587 |
| AD-392909 | UAAGAUGUGUCUUCAAUUUGU | 1153 | 3568-3588 | ACAAAUTGAAGACACAUCUUAAA | 1427 | 3566-3588 |
| AD-392710 | AAGAUGUGUCUUCAAUUUGUA | 1154 | 3569-3589 | UACAAATUGAAGACACAUCUUAA | 1428 | 3567-3589 |
| AD-392956 | AGAUGUGUCUUCAAUUUGUAU | 1155 | 3570-3590 | AUACAAAUUGAAGACACAUCUUA | 1429 | 3568-3590 |
| AD-392874 | AUGUGUCUUCAAUUUGUAUAA | 1156 | 3572-3592 | UUAUACAAAUUGAAGACACAUCU | 1430 | 3570-3592 |
| AD-392957 | UGUCUUCAAUUUGUAUAAAAU | 1157 | 3575-3595 | AUUUUATACAAAUUGAAGACACA | 1431 | 3573-3595 |
| AD-392958 | CUUCAAUUUGUAUAAAAUGGU | 1158 | 3578-3598 | ACCAUUTUAUACAAAUUGAAGAC | 1432 | 3576-3598 |
| AD-392959 | AUGGUGUUUUCAUGUAAAUAA | 1159 | 3594-3614 | UUAUUUACAUGAAAACACCAUUU | 1433 | 3592-3614 |
| AD-392788 | GUAAAUAAAUACAUUCUUGGA | 1160 | 3607-3627 | UCCAAGAAUGUAUUUAUUUACAU | 1434 | 3605-3627 |

TABLE 5
Further Exemplary Human APP-Targeting RNAi Agent Duplexes, Modified Sequences

| | | SEQ | | SEQ | | SEQ |
|---|---|---|---|---|---|---|
| | Sense Strand | ID | Antisense Strand | ID | mRNA target | ID |
| Agent | Oligo Sequence | NO: | Oligo Sequence | NO: | sequence | NO: |
| AD- | usasuga(Ahd)GfuUfCf | 1435 | VPusUfsuuug(Agn)ugauga | 1440 | GAUAUGAAGUUCAUCAUCAAAAA | 1445 |
| 454972 | Afucaucaaasasa | | AfcUfucauasusc | | | |
| AD- | gsgscua(Chd)GfaAfAf | 1436 | VPusUfsaggu(Tgn)ggauuu | 1441 | ACGGCUACGAAAAUCCAACCUAA | 1446 |
| 454973 | Afuccaaccusasa | | UfcGfuagccsgsu | | | |
| AD- | ususugu(Ghd)UfaCfUf | 1437 | VPusAfsauuc(Tgn)uuacag | 1442 | GUUUUGUGUACUGUAAAGAAUUA | 1447 |
| 454842 | Gfuaaagaaususa | | UfaCfacaaasasc | | | |
| AD- | usasgug(Chd)AfuGfAf | 1438 | VPusGfsagaa(Tgn)cuauuc | 1443 | ACUAGUGCAUGAAUAGAUUCUCA | 1448 |
| 454843 | Afuagauucuscsa | | AfuGfcacuasgsu | | | |
| AD- | asasaau(Chd)CfaAfCf | 1439 | VPusGfsaacu(Tgn)guaggu | 1444 | CGAAAAUCCAACCUACAAGUUCA | 1449 |
| 454844 | Cfuacaaguuscsa | | UfgGfauuuuscsg | | | |

Table 5 key: U = uridine-3′-phosphate, u = 2′-O-methyluridine-3′-phosphate, us = 2′-O-methyluridine-3′-phosphorothioate, a = 2′-O-methyladenosine-3′-phosphate, A = adenosine-3′-phosphate, as = 2′-O-methyladenosine-3′-phosphorothioate, (Ahd) = 2′-O-hexadecyl-adenosine-3′-phosphate, Gf = 2′ -fluoroguanosine-3′-phosphate,
Uf = 2′-fluorouridine-3′-phosphate, Cf = 2′-fluorocytidine-3′-phosphate, Af = 2′-fluoroadenosine-3′-phosphate, cs = 2′-O-methylcytidine-3′-phosphate , VP = Vinylphosphate 5′, (Agn) = Adenosine-glycol nucleic acid (GNA), gs = 2′-O-methylguanosine-3-phosphorothioate, (Chd) = 2′-O-hexadecyl-cytidine-3′-phosphate,
(Tgn) = Thymidine-glycol nucleic acid (GNA) S-Isomer,
(Ghd) = 2′-O-hexadecyl-guanosine-3′-phosphate, and cs = 2′-O-methylcytidine-3′-phosphorothioate.

TABLE 6
Further Exemplary Human APP-Targeting RNAi Agent Duplexes, Unmodified Sequences

| | | SEQ | | SEQ | | SEQ |
|---|---|---|---|---|---|---|
| | Sense Strand Oligo | ID | Antisense Strand Oligo | ID | | ID |
| Agent | Sequence | NO: | Sequence | NO: | mRNA target sequence | NO: |
| AD- | UAUGAAGUUCAUCAUCAAAAA | 1450 | UUUUUGAUGAUGAACUUCAUAUC | 1455 | GAUAUGAAGUUCAUCAUCAAAAA | 1445 |
| 454972 | | | | | | |
| AD- | GGCUACGAAAAUCCAACCUAA | 1451 | UUAGGUTGGAUUUUCGUAGCCGU | 1456 | ACGGCUACGAAAAUCCAACCUAA | 1446 |
| 454973 | | | | | | |
| AD- | UUUGUGUACUGUAAAGAAUUA | 1452 | UAAUUCTUUACAGUACACAAAAC | 1457 | GUUUUGUGUACUGUAAAGAAUUA | 1447 |
| 454842 | | | | | | |
| AD- | UAGUGCAUGAAUAGAUUCUCA | 1453 | UGAGAATCUAUUCAUGCACUAGU | 1458 | ACUAGUGCAUGAAUAGAUUCUCA | 1448 |
| 454843 | | | | | | |
| AD- | AAAAUCCAACCUACAAGUUCA | 1454 | UGAACUTGUAGGUUGGAUUUUCG | 1459 | CGAAAAUCCAACCUACAAGUUCA | 1449 |
| 454844 | | | | | | |

TABLE 7
More Exemplary Human APP-Targeting RNAi Agent Duplexes, Modified Sequences

| | | SEQ | | SEQ | | SEQ |
|---|---|---|---|---|---|---|
| Duplex | Sense Sequence | ID | Antisense Sequence | ID | | ID |
| Name | (5′ to 3′) | NO | (5′ to 3′) | NO | mRNA target sequence | NO |
| AD- | asasagagCfaAfAfAf | 1460 | asUfscugAfaUfAfguuuUfg | 1471 | AGAAAGAGCAAAACUAUUCAGAU | 1482 |
| 506935.2 | cuauucagauL96 | | Cfucuuuscsu | | | |
| AD- | ususggccAfaCfAfUf | 1461 | asUfscacUfaAfUfcaugUfu | 1472 | UCUUGGCCAACAUGAUUAGUGAA | 1483 |
| 507065.2 | gauuagugauL96 | | Gfgccaasgsa | | | |
| AD- | uscsugggUfuGfAfCf | 1462 | asUfsugaUfaUfUfugucAfa | 1473 | GUUCUGGGUUGACAAAUAUCAAG | 1484 |
| 507159.2 | aaauaucaauL96 | | Cfccagasas | | | |
| AD- | ususuaugAfuUfUfAf | 1463 | asGfsauaAfuGfAfguaaAfu | 1474 | GUUUUAUGAUUUACUCAUUAUCG | 1485 |
| 507538.2 | cucauuaucuL96 | | Cfauaaasasc | | | |
| AD- | asusgccuGfaAfCfUf | 1464 | asAfsuuaAfuUfCfaaguUfc | 1475 | AGAUGCCUGAACUUGAAUUAAUC | 1486 |
| 507624.2 | ugaauuaauuL96 | | Afggcauscsu | | | |
| AD- | asgsaugcCfuGfAfAf | 1465 | asUfsaauUfcAfAfguucAfg | 1476 | GUAGAUGCCUGAACUUGAAUUAA | 1487 |
| 507724.2 | cuugaauuauL96 | | Gfcaucusasc | | | |
| AD- | gscscugaAfcUfUfGf | 1466 | asGfsgauUfaAfUfucaaGfu | 1477 | AUGCCUGAACUUGAAUUAAUCCA | 1488 |
| 507725.2 | aauuaauccuL96 | | Ufcaggcsasu | | | |
| AD- | gsusgguuUfgUfGfAf | 1467 | asUfsuaaUfuGfGfgucaCfa | 1478 | UUGUGGUUUGUGACCCAAUUAAG | 1489 |
| 507789.2 | cccaauuaauL96 | | Afaccacsasa | | | |
| AD- | csasgaugCfuUfUfAf | 1468 | asAfsaauCfuCfUfcuaaAfg | 1479 | UUCAGAUGCUUUAGAGAGAUUUU | 1490 |
| 507874.2 | gagagauuuuL96 | | Cfaucugsasa | | | |
| AD- | uscsuugcCfuAfAfGf | 1469 | asAfsaagGfaAfUfacuuAfg | 1480 | UCUCUUGCCUAAGUAUUCCUUUC | 1491 |
| 507928.2 | uauuccuuuuL96 | | Gfcaagasgsa | | | |
| AD- | ususgcugCfuUfCfUf | 1470 | asAfsaauAfuAfGfcagaAfg | 1481 | GAUUGCUGCUUCUGCUAUAUUUG | 1492 |
| 507949.2 | gcuauauuuuL96 | | Cfagcaasusc | | | |

Table 10 key: U = uridine-3′-phosphate, u = 2′-O-methyluridine-3′-phosphate, us = 2′-O-methyluridine-3′-phosphorothioate, a = 2′-O-methyladenosine-3′-phosphate, A = adenosine-3′-phosphate, as = 2′-O-methyladenosine-3′-phosphorothioate, (Ahd) = 2′-O-hexadecyl-adenosine-3′-phosphate, Gf = 2′-fluoroguanosine-3′-phosphate,
Uf = 2′-fluorouridine-3′-phosphate, Cf = 2′-fluorocytidine-3′-phosphate, Af = 2′-fluoroadenosine-3′-phosphate, cs = 2′-O-methylcytidine-3′-phosphate , VP = Vinylphosphate 5′, (Agn) = Adenosine-glycol nucleic acid (GNA), gs = 2′-O-methylguanosine-3′-phosphorothioate, (Chd) = 2′-O-hexadecyl-cytidine-3′-phosphate,
(Tgn) = Thymidine-glycol nucleic acid (GNA) S-Isomer, (Ghd) = 2′-O-hexadecyl-guanosine-3′-phosphate, and cs = 2′-O-methylcytidine-3′-phosphorothioate.

TABLE 8
Additional APP-Targeting RNAi Agents, Unmodified Sequences; NM_000484.3 and
NM_201414.2 Targeting

| | | SEQ | | Antisense | SEQ | | Cross |
|---|---|---|---|---|---|---|---|
| Duplex | Sense Sequence | ID | Source Name | Sequence | ID | Source Name | Spe- |
| Name | (5′ to 3′) | NO | (Range) | (5′ to 3′) | NO | (Range) | cies |
| AD- | AAAGAGCAAAACUA | 1493 | NM_000484.3_1902- | AUCUGAAUAGUUUU | 1504 | NM_201414.2_1675- | UNK |
| 506935.2 | UUCAGAU | | 1922_s | GCUCUUUCU | | 1697_as | |
| | | | (1902-1922) | | | (1900-1922) | |
| AD- | UUGGCCAACAUGAU | 1494 | NM_201414.2_1704- | AUCACUAAUCAUGU | 1505 | NM_201414.2_1702- | UNK |
| 507065.2 | UAGUGAU | | 1724_A21U_s | UGGCCAAGA | | 1724_U1A_as | |
| | | | (1704-1724) | | | (1702-1724) | |
| AD- | UCUGGGUUGACAAA | 1495 | NM_000484.3_2166- | AUUGAUAUUUGUCA | 1506 | NM_201414.2_1939- | UNK |
| 507159.2 | UAUCAAU | | 2186_G21U_s | ACCCAGAAC | | 1961_C1A_as | |
| | | | (2166-2186) | | | (2164-2186) | |
| AD- | UUUAUGAUUUACUC | 1496 | NM_000484.3_2613- | AGAUAAUGAGUAAA | 1507 | NM_201414.2_2386- | UNK |
| 507538.2 | AUUAUCU | | 2633_G21U_s | UCAUAAAAC | | 2408_C1A_as | |
| | | | (2613-2633) | | | (2611-2633) | |
| AD- | AUGCCUGAACUUGA | 1497 | NM_000484.3_2665- | AAUUAAUUCAAGUU | 1508 | NM_201414.2_2438- | UNK |
| 507624.2 | AUUAAUU | | 2685_C21U_s | CAGGCAUCU | | 2460_G1A_as | |
| | | | (2665-2685) | | | (2663-2685) | |
| AD- | AGAUGCCUGAACUU | 1498 | NM_201414.2_2438- | AUAAUUCAAGUUCA | 1509 | NM_201414.2_2436- | UNK |
| 507724.2 | GAAUUAU | | 2458_A21U_s | GGCAUCUAC | | 2458_U1A_as | |
| | | | (2438-2458) | | | (2436-2458) | |
| AD- | GCCUGAACUUGAAU | 1499 | NM_201414.2_2442- | AGGAUUAAUUCAAG | 1510 | NM_201414.2_2440- | UNK |
| 507725.2 | UAAUCCU | | 2462_A21U_s | UUCAGGCAU | | 2462_U1A_as | |
| | | | (2442-2462) | | | (2440-2462) | |
| AD- | GUGGUUUGUGACCC | 1500 | NM_000484.3_2853- | AUUAAUUGGGUCAC | 1511 | NM_201414.2_2626- | UNK |
| 507789.2 | AAUUAAU | | 2873_G21U_s | AAACCACAA | | 2648_C1A_as | |
| | | | (2853-2873) | | | (2851-2873) | |
| AD- | CAGAUGCUUUAGAG | 1501 | NM_000484.3_3006- | AAAAUCUCUCUAAA | 1512 | NM_201414.2_2779- | UNK |
| 507874.2 | AGAUUUU | | 3026_s | GCAUCUGAA | | 2801_as | |
| | | | (3006-3026) | | | (3004-3026) | |
| AD- | UCUUGCCUAAGUAU | 1502 | NM_201414.2_2718- | AAAAGGAAUACUUA | 1513 | NM_201414.2_2716- | UNK |
| 507928.2 | UCCUUUU | | 2738_C21U_s | GGCAAGAGA | | 2738_G1A_as | |
| | | | (2718-2738) | | | (2716-2738) | |
| AD- | UUGCUGCUUCUGCU | 1503 | NM_201414.2_2831- | AAAAUAUAGCAGAA | 1514 | NM_201414.2_2829- | UNK |
| 507949.2 | AUAUUUU | | 2851_G21U_s | GCAGCAAUC | | 2851_C1A_as | |
| | | | (2831-2851) | | | (2829-2851) | |

TABLE 9
Additional Human APP-Targeting RNAi Agents, Modified Sequences.

| | | SEQ | | SEQ |
|---|---|---|---|---|
| Duplex | | ID | | ID |
| Name | Sense Sequence (5′ to 3′) | NO | Antisense Sequence (5′ to 3′) | NO |
| AD-738012.1 | csgscuu(Uhd)CfuAfCfAfcuguauuacaL96 | 1515 | VPusGfsuaaUfaCfAfguguAfgAfaagcgsasu | 1605 |
| AD-738013.1 | gscsuuu(Chd)UfaCfAfCfuguauuacaaL96 | 1516 | VPusUfsguaAfuAfCfagugUfaGfaaagcsgsa | 1606 |
| AD-738014.1 | ususcua(Chd)AfcUfGfUfauuacauaaaL96 | 1517 | VPusUfsuauGfuAfAfuacaGfuGfuagaasasg | 1607 |
| AD-738015.1 | ususucu(Ahd)CfaCfUfGfuauuacauaaL96 | 1518 | VPusUfsaugUfaAfUfacagUfgUfagaaasgsc | 1608 |
| AD-738016.1 | asusuua(Ghd)CfuGfUfAfucaaacuagaL96 | 1519 | VPusCfsuagUfuUfGfauacAfgCfuaaaususc | 1609 |
| AD-738017.1 | ususccu(Ghd)AfuCfAfCfuaugcauuuaL96 | 1520 | VPusAfsaauGfcAfUfagugAfuCfaggaasasg | 1610 |
| AD-738018.1 | gsusgcu(Ghd)UfaAfCfAfcaaguagauaL96 | 1521 | VPusAfsucuAfcUfUfguguUfaCfagcacsasg | 1611 |
| AD-738019.1 | ususuag(Chd)UfgUfAfUfcaaacuaguaL96 | 1522 | VPusAfscuaGfuUfUfgauaCfaGfcuaaasusu | 1612 |
| AD-738020.1 | ususucc(Uhd)GfaUfCfAfcuaugcauuaL96 | 1523 | VPusAfsaugCfaUfAfgugaUfcAfggaaasgsg | 1613 |
| AD-738021.1 | asasugg(Ghd)UfuUfUfGfuguacuguaaL96 | 1524 | VPusUfsacaGfuAfCfacaaAfaCfccauusasa | 1614 |
| AD-738022.1 | asusugu(Ahd)CfaGfAfAfucauugcuuaL96 | 1525 | VPusAfsagcAfaUfGfauucUfgUfacaauscsa | 1615 |
| AD-738023.1 | ususgua(Chd)AfgAfAfUfcauugcuuaaL96 | 1526 | VPusUfsaagCfaAfUfgauuCfuGfuacaasusc | 1616 |
| AD-738024.1 | ususacu(Ghd)UfaCfAfGfauugcugcuaL96 | 1527 | VPusAfsgcaGfcAfAfucugUfaCfaguaasasa | 1617 |
| AD-738025.1 | asusaug(Chd)UfgAfAfGfaaguacgucaL96 | 1528 | VPusGfsacgUfaCfUfucuuCfaGfcauaususg | 1618 |
| AD-738026.1 | ascscau(Uhd)GfcUfUfCfacuacccauaL96 | 1529 | VPusAfsuggGfuAfGfugaaGfcAfauggususu | 1619 |
| AD-738027.1 | csusgug(Chd)UfgUfAfAfcacaaguagaL96 | 1530 | VPusCfsuacUfuGfUfguuaCfaGfcacagscsu | 1620 |
| AD-738028.1 | usgscug(Uhd)AfaCfAfCfaaguagaugaL96 | 1531 | VPusCfsaucUfaCfUfugugUfuAfcagcascsa | 1621 |
| AD-738029.1 | ascsagc(Uhd)GfuGfCfUfguaacacaaaL96 | 1532 | VPusUfsuguGfuUfAfcagcAfcAfgcuguscsa | 1622 |
| AD-738030.1 | gscsugu(Ahd)AfcAfCfAfaguagaugcaL96 | 1533 | VPusGfscauCfuAfCfuuguGfuUfacagcsasc | 1623 |
| AD-738031.1 | uscsaaa(Chd)UfaGfUfGfcaugaauagaL96 | 1534 | VPusCfsuauUfcAfUfgcacUfaGfuuugasusa | 1624 |
| AD-738032.1 | csasaac(Uhd)AfgUfGfCfaugaauagaaL96 | 1535 | VPusUfscuaUfuCfAfugcaCfuAfguuugsasu | 1625 |
| AD-738033.1 | usgscag(Ghd)AfuGfAfUfuguacagaaaL96 | 1536 | VPusUfsucuGfuAfCfaaucAfuCfcugcasgsa | 1626 |
| AD-738034.1 | gscsagg(Ahd)UfgAfUfUfguacagaauaL96 | 1537 | VPusAfsuucUfgUfAfcaauCfaUfccugcsasg | 1627 |
| AD-738035.1 | csasgga(Uhd)GfaUfUfGfuacagaaucaL96 | 1538 | VPusGfsauuCfuGfUfacaaUfcAfuccugscsa | 1628 |
| AD-738036.1 | usasuca(Ahd)AfcUfAfGfugcaugaauaL96 | 1539 | VPusAfsuucAfuGfCfacuaGfuUfugauascsa | 1629 |
| AD-738037.1 | ususugu(Ghd)CfcUfGfUfuuuaugugcaL96 | 1540 | VPusGfscacAfuAfAfaacaGfgCfacaaasgsa | 1630 |
| AD-738038.1 | ususgug(Chd)CfuGfUfUfuuaugugcaaL96 | 1541 | VPusUfsgcaCfaUfAfaaacAfgGfcacaasasg | 1631 |
| AD-738039.1 | csusgca(Ghd)GfaUfGfAfuuguacagaaL96 | 1542 | VPusUfscugUfaCfAfaucaUfcCfugcagsasa | 1632 |
| AD-738040.1 | csasggu(Chd)AfuGfAfGfagaaugggaaL96 | 1543 | VPusUfscccAfuUfCfucucAfuGfaccugsgsg | 1633 |
| AD-738041.1 | usasugu(Ghd)CfaCfAfCfauuaggcauaL96 | 1544 | VPusAfsugcCfuAfAfugugUfgCfacauasasa | 1634 |
| AD-738042.1 | usgsugc(Ahd)CfaCfAfUfuaggcauugaL96 | 1545 | VPusCfsaauGfcCfUfaaugUfgUfgcacasusa | 1635 |
| AD-738043.1 | gsgsaug(Ahd)UfuGfUfAfcagaaucauaL96 | 1546 | VPusAfsugaUfuCfUfguacAfaUfcauccsusg | 1636 |
| AD-738044.1 | ascscau(Chd)CfaGfAfAfcuggugcaaaL96 | 1547 | VPusUfsugcAfcCfAfguucUfgGfaugguscsa | 1637 |
| AD-738045.1 | usasugc(Uhd)GfaAfGfAfaguacguccaL96 | 1548 | VPusGfsgacGfuAfCfuucuUfcAfgcauasusu | 1638 |
| AD-738046.1 | asusgcu(Ghd)AfaGfAfAfguacguccgaL96 | 1549 | VPusCfsggaCfgUfAfcuucUfuCfagcausasu | 1639 |
| AD-738047.1 | asasacc(Ahd)UfuGfCfUfucacuacccaL96 | 1550 | VPusGfsgguAfgUfGfaagcAfaUfgguuususg | 1640 |
| AD-738048.1 | asascca(Uhd)UfgCfUfUfcacuacccaaL96 | 1551 | VPusUfsgggUfaGfUfgaagCfaAfugguususu | 1641 |
| AD-397217.2 | csasccg(Ahd)GfaGfAfGfaaugucccaaL96 | 1552 | VPusUfsgggAfcAfUfucucUfcUfcggugscsu | 1642 |
| AD-738049.1 | gsusugu(Ahd)UfaUfUfAfuucuuguggaL96 | 1553 | VPusCfscacAfaGfAfauaaUfaUfacaacsusg | 1643 |
| AD-738050.1 | ususaug(Uhd)GfcAfCfAfcauuaggcaaL96 | 1554 | VPusUfsgccUfaAfUfguguGfcAfcauaasasa | 1644 |
| AD-738051.1 | asusgug(Chd)AfcAfCfAfuuaggcauuaL96 | 1555 | VPusAfsaugCfcUfAfauguGfuGfcacausasa | 1645 |
| AD-738052.1 | gsusgca(Chd)AfcAfUfUfaggcauugaaL96 | 1556 | VPusUfscaaUfgCfCfuaauGfuGfugcacsasu | 1646 |
| AD-738053.1 | usgsauu(Ghd)UfaCfAfGfaaucauugcaL96 | 1557 | VPusGfscaaUfgAfUfucugUfaCfaaucasusc | 1647 |
| AD-738054.1 | gscsuuc(Ahd)CfuAfCfCfcaucgguguaL96 | 1558 | VPusAfscacCfgAfUfggguAfgUfgaagcsasa | 1648 |
| AD-738055.1 | ususuua(Uhd)GfuGfCfAfcacauuaggaL96 | 1559 | VPusCfscuaAfuGfUfgugcAfcAfuaaaascsa | 1649 |
| AD-738056.1 | csgscuu(Uhd)CfuAfCfAfcuguauuacaL96 | 1560 | VPusGfsuaau(Agn)caguguAfgAfaagcgsasu | 1650 |
| AD-738057.1 | gscsuuu(Chd)UfaCfAfCfuguauuacaaL96 | 1561 | VPusUfsguaa(Tgn)acagugUfaGfaaagcsgsa | 1651 |
| AD-738058.1 | ususcua(Chd)AfcUfGfUfauuacauaaaL96 | 1562 | VPusUfsuaug(Tgn)aauacaGfuGfuagaasasg | 1652 |
| AD-738059.1 | ususucu(Ahd)CfaCfUfGfuauuacauaaL96 | 1563 | VPusUfsaugu(Agn)auacagUfgUfagaaasgsc | 1653 |
| AD-738060.1 | asusuua(Ghd)CfuGfUfAfucaaacuagaL96 | 1564 | VPusCfsuagu(Tgn)ugauacAfgCfuaaaususc | 1654 |
| AD-738061.1 | ususccu(Ghd)AfuCfAfCfuaugcauuuaL96 | 1565 | VPusAfsaaug(Cgn)auagugAfuCfaggaasasg | 1655 |
| AD-738062.1 | gsusgcu(Ghd)UfaAfCfAfcaaguagauaL96 | 1566 | VPusAfsucua(Cgn)uuguguUfaCfagcacsasg | 1656 |
| AD-738063.1 | ususuag(Chd)UfgUfAfUfcaaacuaguaL96 | 1567 | VPusAfscuag(Tgn)uugauaCfaGfcuaaasusu | 1657 |
| AD-738064.1 | ususucc(Uhd)GfaUfCfAfcuaugcauuaL96 | 1568 | VPusAfsaugc(Agn)uagugaUfcAfggaaasgsg | 1658 |
| AD-738065.1 | asasugg(Ghd)UfuUfUfGfuguacuguaaL96 | 1569 | VPusUfsacag(Tgn)acacaaAfaCfccauusasa | 1659 |
| AD-738066.1 | ususacu(Ghd)UfaCfAfGfauugcugcuaL96 | 1570 | VPusAfsgcag(Cgn)aaucugUfaCfaguaasasa | 1660 |
| AD-738067.1 | asusugu(Ahd)CfaGfAfAfucauugcuuaL96 | 1571 | VPusAfsagca(Agn)ugauucUfgUfacaauscsa | 1661 |
| AD-738068.1 | ususgua(Chd)AfgAfAfUfcauugcuuaaL96 | 1572 | VPusUfsaagc(Agn)augauuCfuGfuacaasusc | 1662 |
| AD-738069.1 | asusaug(Chd)UfgAfAfGfaaguacgucaL96 | 1573 | VPusGfsacgu(Agn)cuucuuCfaGfcauaususg | 1663 |
| AD-738070.1 | ascscau(Uhd)GfcUfUfCfacuacccauaL96 | 1574 | VPusAfsuggg(Tgn)agugaaGfcAfauggususu | 1664 |
| AD-738071.1 | csusgug(Chd)UfgUfAfAfcacaaguagaL96 | 1575 | VPusCfsuacu(Tgn)guguuaCfaGfcacagscsu | 1665 |
| AD-738072.1 | usgscug(Uhd)AfaCfAfCfaaguagaugaL96 | 1576 | VPusCfsaucu(Agn)cuugugUfuAfcagcascsa | 1666 |
| AD-738073.1 | ascsagc(Uhd)GfuGfCfUfguaacacaaaL96 | 1577 | VPusUfsugug(Tgn)uacagcAfcAfgcuguscsa | 1667 |
| AD-738074.1 | gscsugu(Ahd)AfcAfCfAfaguagaugcaL96 | 1578 | VPusGfscauc(Tgn)acuuguGfuUfacagcsasc | 1668 |
| AD-738075.1 | uscsaaa(Chd)UfaGfUfGfcaugaauagaL96 | 1579 | VPusCfsuauu(Cgn)augcacUfaGfuuugasusa | 1669 |
| AD-738076.1 | csasaac(Uhd)AfgUfGfCfaugaauagaaL96 | 1580 | VPusUfscuau(Tgn)caugcaCfuAfguuugsasu | 1670 |
| AD-738077.1 | usgscag(Ghd)AfuGfAfUfuguacagaaaL96 | 1581 | VPusUfsucug(Tgn)acaaucAfuCfcugcasgsa | 1671 |
| AD-738078.1 | gscsagg(Ahd)UfgAfUfUfguacagaauaL96 | 1582 | VPusAfsuucu(Ggn)uacaauCfaUfccugcsasg | 1672 |
| AD-738079.1 | csasgga(Uhd)GfaUfUfGfuacagaaucaL96 | 1583 | VPusGfsauuc(Tgn)guacaaUfcAfuccugscsa | 1673 |
| AD-738080.1 | usasuca(Ahd)AfcUfAfGfugcaugaauaL96 | 1584 | VPusAfsuuca(Tgn)gcacuaGfuUfugauascsa | 1674 |
| AD-738081.1 | ususugu(Ghd)CfcUfGfUfuuuaugugcaL96 | 1585 | VPusGfscaca(Tgn)aaaacaGfgCfacaaasgsa | 1675 |
| AD-738082.1 | ususgug(Chd)CfuGfUfUfuuaugugcaaL96 | 1586 | VPusUfsgcac(Agn)uaaaacAfgGfcacaasasg | 1676 |
| AD-738083.1 | csusgca(Ghd)GfaUfGfAfuuguacagaaL96 | 1587 | VPusUfscugu(Agn)caaucaUfcCfugcagsasa | 1677 |
| AD-738084.1 | csasggu(Chd)AfuGfAfGfagaaugggaaL96 | 1588 | VPusUfsccca(Tgn)ucucucAfuGfaccugsgsg | 1678 |
| AD-738085.1 | usasugc(Uhd)GfaAfGfAfaguacguccaL96 | 1589 | VPusGfsgacg(Tgn)acuucuUfcAfgcauasusu | 1679 |
| AD-738086.1 | asusgcu(Ghd)AfaGfAfAfguacguccgaL96 | 1590 | VPusCfsggac(Ggn)uacuucUfuCfagcausasu | 1680 |
| AD-738087.1 | asasacc(Ahd)UfuGfCfUfucacuacccaL96 | 1591 | VPusGfsggua(Ggn)ugaagcAfaUfgguuususg | 1681 |
| AD-738088.1 | asascca(Uhd)UfgCfUfUfcacuacccaaL96 | 1592 | VPusUfsgggu(Agn)gugaagCfaAfugguususu | 1682 |
| AD-738089.1 | usasugu(Ghd)CfaCfAfCfauuaggcauaL96 | 1593 | VPusAfsugcc(Tgn)aaugugUfgCfacauasasa | 1683 |
| AD-738090.1 | usgsugc(Ahd)CfaCfAfUfuaggcauugaL96 | 1594 | VPusCfsaaug(Cgn)cuaaugUfgUfgcacasusa | 1684 |
| AD-738091.1 | gsgsaug(Ahd)UfuGfUfAfcagaaucauaL96 | 1595 | VPusAfsugau(Tgn)cuguacAfaUfcauccsusg | 1685 |
| AD-738092.1 | ascscau(Chd)CfaGfAfAfcuggugcaaaL96 | 1596 | VPusUfsugca(Cgn)caguucUfgGfaugguscsa | 1686 |
| AD-738093.1 | csasccg(Ahd)GfaGfAfGfaaugucccaaL96 | 1597 | VPusUfsggga(Cgn)auucucUfcUfcggugscsu | 1687 |
| AD-738094.1 | gsusugu(Ahd)UfaUfUfAfuucuuguggaL96 | 1598 | VPusCfscaca(Agn)gaauaaUfaUfacaacsusg | 1688 |
| AD-738095.1 | ususaug(Uhd)GfcAfCfAfcauuaggcaaL96 | 1599 | VPusUfsgccu(Agn)auguguGfcAfcauaasasa | 1689 |
| AD-738096.1 | asusgug(Chd)AfcAfCfAfuuaggcauuaL96 | 1600 | VPusAfsaugc(Cgn)uaauguGfuGfcacausasa | 1690 |
| AD-738097.1 | gsusgca(Chd)AfcAfUfUfaggcauugaaL96 | 1601 | VPusUfscaau(Ggn)ccuaauGfuGfugcacsasu | 1691 |
| AD-738098.1 | usgsauu(Ghd)UfaCfAfGfaaucauugcaL96 | 1602 | VPusGfscaau(Ggn)auucugUfaCfaaucasusc | 1692 |
| AD-738099.1 | gscsuuc(Ahd)CfuAfCfCfcaucgguguaL96 | 1603 | VPusAfscacc(Ggn)auggguAfgUfgaagcsasa | 1693 |
| AD-738100.1 | ususuua(Uhd)GfuGfCfAfcacauuaggaL96 | 1604 | VPusCfscuaa(Tgn)gugugcAfcAfuaaaascsa | 1694 |

Table 9 key: U = uridine-3′-phosphate, u = 2′-O-methyluridine-3′-phosphate, us = 2′-O-methyluridine-3′-phosphorothioate, a = 2′-O-methyladenosine-3′-phosphate, A = adenosine-3′-phosphate, as = 2′-O-methyladenosine-3′-phosphorothioate, (Ahd) = 2′-O-hexadecyl-adenosine-3′-phosphate, Gf = 2′-fluoroguanosine-3′-phosphate, Uf-2′-fluorouridine-3′-phosphate,
Cf = 2′-fluorocytidine-3′-phosphate, Af = 2′-fluoroadenosine-3′-phosphate, cs = 2′-O-methylcytidine-3′-phosphate, VP = Vinylphosphate 5′, (Agn) = Adenosine-glycol nucleic acid (GNA), gs = 2′-O-methylguanosine-3′-phosphorothioate, (Chd) = 2′-O-hexadecyl-cytidine-3′-phosphate, (Tgn) = Thymidine-glycol nucleic acid (GNA) S-Isomer, (Ghd) = 2′-O-hexadecyl-guanosine-3′-phosphate, and cs = 2′-O-methylcytidine-3′-phosphorothioate.

TABLE 10
Additional Human APP-Targeting RNAi Agents, Unmodified Sequences;
XM_005548887.2 and NM_001198823.1 Targeting.

| | | SEQ | | SEQ | |
|---|---|---|---|---|---|
| Duplex | Sense Sequence | ID | Antisense Sequence | ID | |
| Name | (5′ to 3′) | NO | (5′ to 3′) | NO | Source Name |
| AD- | CGCUUUCUACACUGUAUUACA | 1695 | UGUAAUACAGUGUAGAAAGCGAU | 1785 | XM_005548887.2_3401- |
| 738012.1 | | | | | 3423_as |
| AD- | GCUUUCUACACUGUAUUACAA | 1696 | UUGUAAUACAGUGUAGAAAGCGA | 1786 | XM_005548887.2_3402- |
| 738013.1 | | | | | 3424_as |
| AD- | UUCUACACUGUAUUACAUAAA | 1697 | UUUAUGUAAUACAGUGUAGAAAG | 1787 | NM_001198823.1_3306- |
| 738014.1 | | | | | 3328_as |
| AD- | UUUCUACACUGUAUUACAUAA | 1698 | UUAUGUAAUACAGUGUAGAAAGC | 1788 | NM_001198823.1_3305- |
| 738015.1 | | | | | 3327_as |
| AD- | AUUUAGCUGUAUCAAACUAGA | 1699 | UCUAGUUUGAUACAGCUAAAUUC | 1789 | XM_005548887.2_2837- |
| 738016.1 | | | | | 2859_as |
| AD- | UUCCUGAUCACUAUGCAUUUA | 1700 | UAAAUGCAUAGUGAUCAGGAAAG | 1790 | XM_005548887.2_3030- |
| 738017.1 | | | | | 3052_as |
| AD- | GUGCUGUAACACAAGUAGAUA | 1701 | UAUCUACUUGUGUUACAGCACAG | 1791 | NM_001198823.1_2602- |
| 738018.1 | | | | | 2624_C1A_as |
| AD- | UUUAGCUGUAUCAAACUAGUA | 1702 | UACUAGUUUGAUACAGCUAAAUU | 1792 | XM_005548887.2_2838- |
| 738019.1 | | | | | 2860_as |
| AD- | UUUCCUGAUCACUAUGCAUUA | 1703 | UAAUGCAUAGUGAUCAGGAAAGG | 1793 | XM_005548887.2_3029- |
| 738020.1 | | | | | 3051_as |
| AD- | AAUGGGUUUUGUGUACUGUAA | 1704 | UUACAGUACACAAAACCCAUUAA | 1794 | XM_005548887.2_2813- |
| 738021.1 | | | | | 2835_as |
| AD- | AUUGUACAGAAUCAUUGCUUA | 1705 | UAAGCAAUGAUUCUGUACAAUCA | 1795 | NM_001198823.1_3272- |
| 738022.1 | | | | | 3294_as |
| AD- | UUGUACAGAAUCAUUGCUUAA | 1706 | UUAAGCAAUGAUUCUGUACAAUC | 1796 | NM_001198823.1_3273- |
| 738023.1 | | | | | 3295_as |
| AD- | UUACUGUACAGAUUGCUGCUA | 1707 | UAGCAGCAAUCUGUACAGUAAAA | 1797 | XM_005548887.2_3113- |
| 738024.1 | | | | | 3135_as |
| AD- | AUAUGCUGAAGAAGUACGUCA | 1708 | UGACGUACUUCUUCAGCAUAUUG | 1798 | XM_005548887.2_1740- |
| 738025.1 | | | | | 1762_as |
| AD- | ACCAUUGCUUCACUACCCAUA | 1709 | UAUGGGUAGUGAAGCAAUGGUUU | 1799 | NM_001198823.1_2506- |
| 738026.1 | | | | | 2528_G1A_as |
| AD- | CUGUGCUGUAACACAAGUAGA | 1710 | UCUACUUGUGUUACAGCACAGCU | 1800 | NM_001198823.1_2600- |
| 738027.1 | | | | | 2622_as |
| AD- | UGCUGUAACACAAGUAGAUGA | 1711 | UCAUCUACUUGUGUUACAGCACA | 1801 | NM_001198823.1_2603- |
| 738028.1 | | | | | 2625_G1A_as |
| AD- | ACAGCUGUGCUGUAACACAAA | 1712 | UUUGUGUUACAGCACAGCUGUCA | 1802 | NM_001198823.1_2596- |
| 738029.1 | | | | | 2618_C1A_as |
| AD- | GCUGUAACACAAGUAGAUGCA | 1713 | UGCAUCUACUUGUGUUACAGCAC | 1803 | NM_001198823.1_2604- |
| 738030.1 | | | | | 2626_G1A_as |
| AD- | UCAAACUAGUGCAUGAAUAGA | 1714 | UCUAUUCAUGCACUAGUUUGAUA | 1804 | NM_001198823.1_2742- |
| 738031.1 | | | | | 2764_as |
| AD- | CAAACUAGUGCAUGAAUAGAA | 1715 | UUCUAUUCAUGCACUAGUUUGAU | 1805 | NM_001198823.1_2743- |
| 738032.1 | | | | | 2765_as |
| AD- | UGCAGGAUGAUUGUACAGAAA | 1716 | UUUCUGUACAAUCAUCCUGCAGA | 1806 | NM_001198823.1_3263- |
| 738033.1 | | | | | 3285_as |
| AD- | GCAGGAUGAUUGUACAGAAUA | 1717 | UAUUCUGUACAAUCAUCCUGCAG | 1807 | NM_001198823.1_3264- |
| 738034.1 | | | | | 3286_G1A_as |
| AD- | CAGGAUGAUUGUACAGAAUCA | 1718 | UGAUUCUGUACAAUCAUCCUGCA | 1808 | NM_001198823.1_3265- |
| 738035.1 | | | | | 3287_as |
| AD- | UAUCAAACUAGUGCAUGAAUA | 1719 | UAUUCAUGCACUAGUUUGAUACA | 1809 | NM_001198823.1_2740- |
| 738036.1 | | | | | 2762_as |
| AD- | UUUGUGCCUGUUUUAUGUGCA | 1720 | UGCACAUAAAACAGGCACAAAGA | 1810 | NM_001198823.1_3070- |
| 738037.1 | | | | | 3092_as |
| AD- | UUGUGCCUGUUUUAUGUGCAA | 1721 | UUGCACAUAAAACAGGCACAAAG | 1811 | NM_001198823.1_3071- |
| 738038.1 | | | | | 3093_G1A_as |
| AD- | CUGCAGGAUGAUUGUACAGAA | 1722 | UUCUGUACAAUCAUCCUGCAGAA | 1812 | NM_001198823.1_3262- |
| 738039.1 | | | | | 3284_as |
| AD- | CAGGUCAUGAGAGAAUGGGAA | 1723 | UUCCCAUUCUCUCAUGACCUGGG | 1813 | NM_001198823.1_1369- |
| 738040.1 | | | | | 1391_as |
| AD- | UAUGUGCACACAUUAGGCAUA | 1724 | UAUGCCUAAUGUGUGCACAUAAA | 1814 | NM_001198823.1_3083- |
| 738041.1 | | | | | 3105_as |
| AD- | UGUGCACACAUUAGGCAUUGA | 1725 | UCAAUGCCUAAUGUGUGCACAUA | 1815 | NM_001198823.1_3085- |
| 738042.1 | | | | | 3107_as |
| AD- | GGAUGAUUGUACAGAAUCAUA | 1726 | UAUGAUUCUGUACAAUCAUCCUG | 1816 | NM_001198823.1_3267- |
| 738043.1 | | | | | 3289_as |
| AD- | ACCAUCCAGAACUGGUGCAAA | 1727 | UUUGCACCAGUUCUGGAUGGUCA | 1817 | NM_001198823.1_424- |
| 738044.1 | | | | | 446_C1A_as |
| AD- | UAUGCUGAAGAAGUACGUCCA | 1728 | UGGACGUACUUCUUCAGCAUAUU | 1818 | XM_005548887.2_1741- |
| 738045.1 | | | | | 1763_as |
| AD- | AUGCUGAAGAAGUACGUCCGA | 1729 | UCGGACGUACUUCUUCAGCAUAU | 1819 | XM_005548887.2_1742- |
| 738046.1 | | | | | 1764_as |
| AD- | AAACCAUUGCUUCACUACCCA | 1730 | UGGGUAGUGAAGCAAUGGUUUUG | 1820 | XM_005548887.2_2614- |
| 738047.1 | | | | | 2636_as |
| AD- | AACCAUUGCUUCACUACCCAA | 1731 | UUGGGUAGUGAAGCAAUGGUUUU | 1821 | XM_005548887.2_2615- |
| 738048.1 | | | | | 2637_as |
| AD- | CACCGAGAGAGAAUGUCCCAA | 1732 | UUGGGACAUUCUCUCUCGGUGCU | 1822 | NM_001198823.1_1351- |
| 397217.2 | | | | | 1373_C1A_as |
| AD- | GUUGUAUAUUAUUCUUGUGGA | 1733 | UCCACAAGAAUAAUAUACAACUG | 1823 | XM_005548887.2_2906- |
| 738049.1 | | | | | 2928_as |
| AD- | UUAUGUGCACACAUUAGGCAA | 1734 | UUGCCUAAUGUGUGCACAUAAAA | 1824 | NM_001198823.1_3082- |
| 738050.1 | | | | | 3104_as |
| AD- | AUGUGCACACAUUAGGCAUUA | 1735 | UAAUGCCUAAUGUGUGCACAUAA | 1825 | NM_001198823.1_3084- |
| 738051.1 | | | | | 3106_C1A_as |
| AD- | GUGCACACAUUAGGCAUUGAA | 1736 | UUCAAUGCCUAAUGUGUGCACAU | 1826 | NM_001198823.1_3086- |
| 738052.1 | | | | | 3108_C1A_as |
| AD- | UGAUUGUACAGAAUCAUUGCA | 1737 | UGCAAUGAUUCUGUACAAUCAUC | 1827 | NM_001198823.1_3270- |
| 738053.1 | | | | | 3292_as |
| AD- | GCUUCACUACCCAUCGGUGUA | 1738 | UACACCGAUGGGUAGUGAAGCAA | 1828 | NM_001198823.1_2512- |
| 738054.1 | | | | | 2534_as |
| AD- | UUUUAUGUGCACACAUUAGGA | 1739 | UCCUAAUGUGUGCACAUAAAACA | 1829 | NM_001198823.1_3080- |
| 738055.1 | | | | | 3102_G1A_as |
| AD- | CGCUUUCUACACUGUAUUACA | 1740 | UGUAAUACAGUGUAGAAAGCGAU | 1830 | XM_005548887.2_3401- |
| 738056.1 | | | | | 3423_as |
| AD- | GCUUUCUACACUGUAUUACAA | 1741 | UUGUAATACAGUGUAGAAAGCGA | 1831 | XM_005548887.2_3402- |
| 738057.1 | | | | | 3424_as |
| AD- | UUCUACACUGUAUUACAUAAA | 1742 | UUUAUGTAAUACAGUGUAGAAAG | 1832 | XM_005548887.2_3405- |
| 738058.1 | | | | | 3427_as |
| AD- | UUUCUACACUGUAUUACAUAA | 1743 | UUAUGUAAUACAGUGUAGAAAGC | 1833 | XM_005548887.2_3404- |
| 738059.1 | | | | | 3426_as |
| AD- | AUUUAGCUGUAUCAAACUAGA | 1744 | UCUAGUTUGAUACAGCUAAAUUC | 1834 | XM_005548887.2_2837- |
| 738060.1 | | | | | 2859_as |
| AD- | UUCCUGAUCACUAUGCAUUUA | 1745 | UAAAUGCAUAGUGAUCAGGAAAG | 1835 | XM_005548887.2_3030- |
| 738061.1 | | | | | 3052_as |
| AD- | GUGCUGUAACACAAGUAGAUA | 1746 | UAUCUACUUGUGUUACAGCACAG | 1836 | XM_005548887.2_2716- |
| 738062.1 | | | | | 2738_as |
| AD- | UUUAGCUGUAUCAAACUAGUA | 1747 | UACUAGTUUGAUACAGCUAAAUU | 1837 | XM_005548887.2_2838- |
| 738063.1 | | | | | 2860_as |
| AD- | UUUCCUGAUCACUAUGCAUUA | 1748 | UAAUGCAUAGUGAUCAGGAAAGG | 1838 | XM_005548887.2_3029- |
| 738064.1 | | | | | 3051_as |
| AD- | AAUGGGUUUUGUGUACUGUAA | 1749 | UUACAGTACACAAAACCCAUUAA | 1839 | XM_005548887.2_2813- |
| 738065.1 | | | | | 2835_as |
| AD- | UUACUGUACAGAUUGCUGCUA | 1750 | UAGCAGCAAUCUGUACAGUAAAA | 1840 | XM_005548887.2_3113- |
| 738066.1 | | | | | 3135_as |
| AD- | AUUGUACAGAAUCAUUGCUUA | 1751 | UAAGCAAUGAUUCUGUACAAUCA | 1841 | XM_005548887.2_3371- |
| 738067.1 | | | | | 3393_as |
| AD- | UUGUACAGAAUCAUUGCUUAA | 1752 | UUAAGCAAUGAUUCUGUACAAUC | 1842 | XM_005548887.2_3372- |
| 738068.1 | | | | | 3394_as |
| AD- | AUAUGCUGAAGAAGUACGUCA | 1753 | UGACGUACUUCUUCAGCAUAUUG | 1843 | XM_005548887.2_1740- |
| 738069.1 | | | | | 1762_as |
| AD- | ACCAUUGCUUCACUACCCAUA | 1754 | UAUGGGTAGUGAAGCAAUGGUUU | 1844 | XM_005548887.2_2616- |
| 738070.1 | | | | | 2638_as |
| AD- | CUGUGCUGUAACACAAGUAGA | 1755 | UCUACUTGUGUUACAGCACAGCU | 1845 | XM_005548887.2_2714- |
| 738071.1 | | | | | 2736_as |
| AD- | UGCUGUAACACAAGUAGAUGA | 1756 | UCAUCUACUUGUGUUACAGCACA | 1846 | XM_005548887.2_2717- |
| 738072.1 | | | | | 2739_as |
| AD- | ACAGCUGUGCUGUAACACAAA | 1757 | UUUGUGTUACAGCACAGCUGUCA | 1847 | XM_005548887.2_2710- |
| 738073.1 | | | | | 2732_as |
| AD- | GCUGUAACACAAGUAGAUGCA | 1758 | UGCAUCTACUUGUGUUACAGCAC | 1848 | XM_005548887.2_2718- |
| 738074.1 | | | | | 2740_as |
| AD- | UCAAACUAGUGCAUGAAUAGA | 1759 | UCUAUUCAUGCACUAGUUUGAUA | 1849 | XM_005548887.2_2848- |
| 738075.1 | | | | | 2870_as |
| AD- | CAAACUAGUGCAUGAAUAGAA | 1760 | UUCUAUTCAUGCACUAGUUUGAU | 1850 | XM_005548887.2_2849- |
| 738076.1 | | | | | 2871_as |
| AD- | UGCAGGAUGAUUGUACAGAAA | 1761 | UUUCUGTACAAUCAUCCUGCAGA | 1851 | XM_005548887.2_3362- |
| 738077.1 | | | | | 3384_as |
| AD- | GCAGGAUGAUUGUACAGAAUA | 1762 | UAUUCUGUACAAUCAUCCUGCAG | 1852 | XM_005548887.2_3363- |
| 738078.1 | | | | | 3385_as |
| AD- | CAGGAUGAUUGUACAGAAUCA | 1763 | UGAUUCTGUACAAUCAUCCUGCA | 1853 | XM_005548887.2_3364- |
| 738079.1 | | | | | 3386_as |
| AD- | UAUCAAACUAGUGCAUGAAUA | 1764 | UAUUCATGCACUAGUUUGAUACA | 1854 | XM_005548887.2_2846- |
| 738080.1 | | | | | 2868_as |
| AD- | UUUGUGCCUGUUUUAUGUGCA | 1765 | UGCACATAAAACAGGCACAAAGA | 1855 | XM_005548887.2_3180- |
| 738081.1 | | | | | 3202_as |
| AD- | UUGUGCCUGUUUUAUGUGCAA | 1766 | UUGCACAUAAAACAGGCACAAAG | 1856 | XM_005548887.2_3181- |
| 738082.1 | | | | | 3203_as |
| AD- | CUGCAGGAUGAUUGUACAGAA | 1767 | UUCUGUACAAUCAUCCUGCAGAA | 1857 | XM_005548887.2_3361- |
| 738083.1 | | | | | 3383_as |
| AD- | CAGGUCAUGAGAGAAUGGGAA | 1768 | UUCCCATUCUCUCAUGACCUGGG | 1858 | XM 005548887.2_1487- |
| 738084.1 | | | | | 1509_as |
| AD- | UAUGCUGAAGAAGUACGUCCA | 1769 | UGGACGTACUUCUUCAGCAUAUU | 1859 | XM_005548887.2_1741- |
| 738085.1 | | | | | 1763_as |
| AD- | AUGCUGAAGAAGUACGUCCGA | 1770 | UCGGACGUACUUCUUCAGCAUAU | 1860 | XM_005548887.2_1742- |
| 738086.1 | | | | | 1764_as |
| AD- | AAACCAUUGCUUCACUACCCA | 1771 | UGGGUAGUGAAGCAAUGGUUUUG | 1861 | XM_005548887.2_2614- |
| 738087.1 | | | | | 2636_as |
| AD- | AACCAUUGCUUCACUACCCAA | 1772 | UUGGGUAGUGAAGCAAUGGUUUU | 1862 | XM_005548887.2_2615- |
| 738088.1 | | | | | 2637_as |
| AD- | UAUGUGCACACAUUAGGCAUA | 1773 | UAUGCCTAAUGUGUGCACAUAAA | 1863 | XM_005548887.2_3193- |
| 738089.1 | | | | | 3215_as |
| AD- | UGUGCACACAUUAGGCAUUGA | 1774 | UCAAUGCCUAAUGUGUGCACAUA | 1864 | XM_005548887.2_3195- |
| 738090.1 | | | | | 3217_as |
| AD- | GGAUGAUUGUACAGAAUCAUA | 1775 | UAUGAUTCUGUACAAUCAUCCUG | 1865 | XM_005548887.2_3366- |
| 738091.1 | | | | | 3388_as |
| AD- | ACCAUCCAGAACUGGUGCAAA | 1776 | UUUGCACCAGUUCUGGAUGGUCA | 1866 | XM_005548887.2_767- |
| 738092.1 | | | | | 789_as |
| AD- | CACCGAGAGAGAAUGUCCCAA | 1777 | UUGGGACAUUCUCUCUCGGUGCU | 1867 | XM_005548887.2_1469- |
| 738093.1 | | | | | 1491_as |
| AD- | GUUGUAUAUUAUUCUUGUGGA | 1778 | UCCACAAGAAUAAUAUACAACUG | 1868 | XM_005548887.2_2906- |
| 738094.1 | | | | | 2928_as |
| AD- | UUAUGUGCACACAUUAGGCAA | 1779 | UUGCCUAAUGUGUGCACAUAAAA | 1869 | XM_005548887.2_3192- |
| 738095.1 | | | | | 3214_as |
| AD- | AUGUGCACACAUUAGGCAUUA | 1780 | UAAUGCCUAAUGUGUGCACAUAA | 1870 | XM_005548887.2_3194- |
| 738096.1 | | | | | 3216_as |
| AD- | GUGCACACAUUAGGCAUUGAA | 1781 | UUCAAUGCCUAAUGUGUGCACAU | 1871 | XM_005548887.2_3196- |
| 738097.1 | | | | | 3218_as |
| AD- | UGAUUGUACAGAAUCAUUGCA | 1782 | UGCAAUGAUUCUGUACAAUCAUC | 1872 | XM_005548887.2_3369- |
| 738098.1 | | | | | 3391_as |
| AD- | GCUUCACUACCCAUCGGUGUA | 1783 | UACACCGAUGGGUAGUGAAGCAA | 1873 | XM_005548887.2_2622- |
| 738099.1 | | | | | 2644_as |
| AD- | UUUUAUGUGCACACAUUAGGA | 1784 | UCCUAATGUGUGCACAUAAAACA | 1874 | XM_005548887.2_3190- |
| 738100.1 | | | | | 3212_as |

TABLE 11
Additional Human APP-Targeting RNAi Agents, Modified Sequences.

| | | | SEQ | | SEQ |
|---|---|---|---|---|---|
| | Duplex | | ID | | ID |
| Target | Name | Sense Sequence (5′ to 3′) | NO | Antisense Sequence (5′ to 3′) | NO |
| APP | AD- | usasgug(Chd)AfuGfAfAfuagauucucaL96 | 1875 | VPusGfsagaa(Tgn)cuauucAfuGfcacuasgsu | 1984 |
| | 886823.1 | | | | |
| APP | AD- | usasgug(Chd)AfugAfAfuagauucucaL96 | 1876 | VPusGfsagaa(Tgn)cuauucAfuGfcacuasgsu | 1985 |
| | 886824.1 | | | | |
| APP | AD- | usasgug(Chd)AfudGAfAfuagauucucaL96 | 1877 | VPusGfsagaa(Tgn)cuauucAfuGfcacuasgsu | 1986 |
| | 886825.1 | | | | |
| APP | AD- | usasgug(Chd)AfudGadAuagauucucaL96 | 1878 | VPusGfsagaa(Tgn)cuauUfcAfuGfcacuasgsu | 1987 |
| | 886826.1 | | | | |
| APP | AD- | usasgug(Chd)AfuGfAfAfuagauucucaL96 | 1879 | VPusdGsagaa(Tgn)cuauucAfuGfcacuasgsu | 1988 |
| | 886827.1 | | | | |
| APP | AD- | usasgug(Chd)AfuGfAfAfuagauucucaL96 | 1880 | VPusGfsagaa(Tgn)cuauucAfugcacuasgsu | 1989 |
| | 886828.1 | | | | |
| APP | AD- | usasgug(Chd)AfuGfAfAfuagauucucaL96 | 1881 | VPusGfsagaa(Tgn)cuauucAfudGcacuasgsu | 1990 |
| | 886829.1 | | | | |
| APP | AD- | usasgug(Chd)AfuGfaAfuagauucucaL96 | 1882 | VPusGfsagaa(Tgn)cuaudTcAfudGcacuasgsu | 1991 |
| | 886830.1 | | | | |
| APP | AD- | usasgug(Chd)AfuGfaAfuagauucucaL96 | 1883 | VPusGfsagaa(Tgn)cuaudTcAfugcacuasgsu | 1992 |
| | 886831.1 | | | | |
| APP | AD- | usasgug(Chd)AfuGfAfAfuagauucucaL96 | 1884 | VPusdGsagaa(Tgn)cuauucAfudGcacuasgsu | 1993 |
| | 886832.1 | | | | |
| APP | AD- | usasgug(Chd)AfuGfaAfuagauucucaL96 | 1885 | VPusdGsagaa(Tgn)cuaudTcAfudGcacuasgsu | 1994 |
| | 886833.1 | | | | |
| APP | AD- | usasgug(Chd)AfudGAfAfuagauucucaL96 | 1886 | VPusdGsagaa(Tgn)cuauucAfuGfcacuasgsu | 1995 |
| | 886834.1 | | | | |
| APP | AD- | usasgug(Chd)AfudGAfAfuagauucucaL96 | 1887 | VPusGfsagaa(Tgn)cuauucAfudGcacuasgsu | 1996 |
| | 886836.1 | | | | |
| APP | AD- | usasgug(Chd)AfudGaAfuagauucucaL96 | 1888 | VPusGfsagaa(Tgn)cuaudTcAfudGcacuasgsu | 1997 |
| | 886837.1 | | | | |
| APP | AD- | usasgug(Chd)AfudGaAfuagauucucaL96 | 1889 | VPusGfsagaa(Tgn)cuaudTcAfugcacuasgsu | 1998 |
| | 886838.1 | | | | |
| APP | AD- | usasgug(Chd)AfudGAfAfuagauucucaL96 | 1890 | VPusdGsagaa(Tgn)cuauucAfudGcacuasgsu | 1999 |
| | 886839.1 | | | | |
| APP | AD- | usasgug(Chd)AfudGAfAfuagauucucaL96 | 1891 | VPusdGsagaa(Tgn)cuauucAfudGcacuasgsu | 2000 |
| | 886839.2 | | | | |
| APP | AD- | usasgug(Chd)AfudGAfAfuagauucucaL96 | 1892 | VPusdGsagaa(Tgn)cuaudTcAfudGcacuasgsu | 2001 |
| | 886840.1 | | | | |
| APP | AD- | usasgug(Chd)AfudGaAfuagauucucaL96 | 1893 | VPusdGsagaa(Tgn)cuaudTcAfudGcacuasgsu | 2002 |
| | 886841.1 | | | | |
| APP | AD- | usasgug(Chd)AfudGadAuagauucucaL96 | 1894 | VPusdGsagaa(Tgn)cuaudTcAfudGcacuasgsu | 2003 |
| | 886842.1 | | | | |
| APP | AD- | usasgug(Chd)audGadAuagauucucaL96 | 1895 | VPusdGsagaa(Tgn)cuaudTcAfudGcacuasgsu | 2004 |
| | 886843.1 | | | | |
| APP | AD- | usasgug(Chd)audGadAuagauucucaL96 | 1896 | VPudGagaa(Tgn)cuaudTcAfudGcacuasgsu | 2005 |
| | 886844.1 | | | | |
| APP | AD- | usasgug(Chd)audGadAuagauucucaL96 | 1897 | VPudGagaa(Tgn)cuauUfcAfudGcacuasgsu | 2006 |
| | 886845.1 | | | | |
| APP | AD- | usasgug(Chd)audGadAuagauucucaL96 | 1898 | VPudGadGadAucuauUfcAfudGcacuasgsu | 2007 |
| | 886846.1 | | | | |
| APP | AD- | usasgug(Chd)AfudGAfAfuagauucucaL96 | 1899 | VPudGagaa(Tgn)cuauucAfudGcacuasgsu | 2008 |
| | 886847.1 | | | | |
| APP | AD- | usasgug(Chd)AfudGAfAfuagauucucaL96 | 1900 | VPusdGsagadA(Tgn)cuauucAfudGcacuasgsu | 2009 |
| | 886848.1 | | | | |
| APP | AD- | usasgug(Chd)AfudGAfAfuagauucucaL96 | 1901 | VPusdGsagdAa(Tgn)cuauucAfudGcacuasgsu | 2010 |
| | 886849.1 | | | | |
| APP | AD- | usasgug(Chd)AfudGAfAfuagauucucaL96 | 1902 | VPusdGsagadA(Tgn)cuaudTcAfudGcacuasgsu | 2011 |
| | 886850.1 | | | | |
| APP | AD- | usasgug(Chd)AfudGAfAfuagauucucaL96 | 1903 | VPusdGsagdAa(Tgn)cuaudTcAfudGcacuasgsu | 2012 |
| | 886851.1 | | | | |
| APP | AD- | usasgug(Chd)AfudGAfAfuagauucucaL96 | 1904 | VPusdGsagadA(Tgn)cuaudTcAfugcacuasgsu | 2013 |
| | 886852.1 | | | | |
| APP | AD- | usasgug(Chd)AfudGAfAfuagauucucaL96 | 1905 | VPusdGsagdAa(Tgn)cuaudTcAfugcacuasgsu | 2014 |
| | 886853.1 | | | | |
| APP | AD- | usasgug(Chd)AfudGadAuagauucucaL96 | 1906 | VPusdGsagdAa(Tgn)cuaudTcAfugcacuasgsu | 2015 |
| | 886854.1 | | | | |
| APP | AD- | usasgug(Chd)AfudGAfAfuagauucucaL96 | 1907 | VPudGagadA(Tgn)cuauucAfudGcacuasgsu | 2016 |
| | 886855.1 | | | | |
| APP | AD- | usasgug(Chd)AfudGAfAfuagauucucaL96 | 1908 | VPudGagdAa(Tgn)cuauucAfudGcacuasgsu | 2017 |
| | 886856.1 | | | | |
| APP | AD- | usasgug(Chd)AfudGAfAfuagauucucaL96 | 1909 | VPudGagadA(Tgn)cuaudTcAfudGcacuasgsu | 2018 |
| | 886857.1 | | | | |
| APP | AD- | usasgug(Chd)AfudGAfAfuagauucucaL96 | 1910 | VPudGagdAa(Tgn)cuaudTcAfudGcacuasgsu | 2019 |
| | 886858.1 | | | | |
| APP | AD- | usasgug(Chd)AfudGAfAfuagauucucaL96 | 1911 | VPudGagadA(Tgn)cuaudTcAfugcacuasgsu | 2020 |
| | 886859.1 | | | | |
| APP | AD- | usasgug(Chd)AfudGAfAfuagauucucaL96 | 1912 | VPudGagdAa(Tgn)cuaudTcAfugcacuasgsu | 2021 |
| | 886860.1 | | | | |
| APP | AD- | usasgug(Chd)AfuGfAfAfuagauucucaL96 | 1913 | VPusGfsagaa(Tgn)cuauucAfuGfcacuasusg | 2022 |
| | 886861.1 | | | | |
| APP | AD- | usasgug(Chd)AfudGAfAfuagauucucaL96 | 1914 | VPusdGsagadA(Tgn)cuaudTcAfudGcacuasusg | 2023 |
| | 886862.1 | | | | |
| APP | AD- | usasgug(Chd)AfudGAfAfuagauucucaL96 | 1915 | VPusdGsagdAa(Tgn)cuaudTcAfudGcacuasusg | 2024 |
| | 886863.1 | | | | |
| APP | AD- | gsgscua(Chd)GfaAfAfAfuccaaccuaaL96 | 1916 | VPusUfsaggu(Tgn)ggauuuUfcGfuagccsgsu | 2025 |
| | 886864.1 | | | | |
| APP | AD- | gsgscua(Chd)gaAfAfAfuccaaccuaaL96 | 1917 | VPusUfsaggu(Tgn)ggauuuUfcGfuagccsgsu | 2026 |
| | 886865.1 | | | | |
| APP | AD- | gsgscua(Chd)dGaAfAfAfuccaaccuaaL96 | 1918 | VPusUfsaggu(Tgn)ggauuuUfcGfuagccsgsu | 2027 |
| | 886866.1 | | | | |
| APP | AD- | gsgscua(Chd)GfaAfAfAfuccaaccuaaL96 | 1919 | VPuUfaggu(Tgn)ggauuuUfcGfuagccsgsu | 2028 |
| | 886867.1 | | | | |
| APP | AD- | gsgscua(Chd)GfaAfAfAfuccaaccuaaL96 | 1920 | VPusUfsaggu(Tgn)ggauuuUfcguagccsgsu | 2029 |
| | 886868.1 | | | | |
| APP | AD- | gsgscua(Chd)GfaAfAfAfuccaaccuaaL96 | 1921 | VPusUfsaggu(Tgn)ggauuuUfcdGuagccsgsu | 2030 |
| | 886869.1 | | | | |
| APP | AD- | gsgscua(Chd)GfaAfAfAfuccaaccuaaL96 | 1922 | VPusUfsaggu(Tgn)ggaudTuUfcdGuagccsgsu | 2031 |
| | 886870.1 | | | | |
| APP | AD- | gsgscua(Chd)gaAfaAfuccaaccuaaL96 | 1923 | VPusUfsaggu(Tgn)ggaudTuUfcdGuagccsgsu | 2032 |
| | 886871.1 | | | | |
| APP | AD- | gsgscua(Chd)gaAfaAfuccaaccuaaL96 | 1924 | VPusUfsaggu(Tgn)ggauUfuUfcdGuagccsgsu | 2033 |
| | 886872.1 | | | | |
| APP | AD- | gsgscua(Chd)gadAadAuccaaccuaaL96 | 1925 | VPusUfsaggu(Tgn)ggaudTuUfcdGuagccsgsu | 2034 |
| | 886873.1 | | | | |
| APP | AD- | gsgscua(Chd)GfaAfAfAfuccaaccuaaL96 | 1926 | VPusUfsaggu(Tgn)ggaudTuUfcguagccsgsu | 2035 |
| | 886874.1 | | | | |
| APP | AD- | gsgscua(Chd)gaAfaAfuccaaccuaaL96 | 1927 | VPusUfsaggu(Tgn)ggaudTuUfcguagccsgsu | 2036 |
| | 886875.1 | | | | |
| APP | AD- | gsgscua(Chd)gaAfaAfuccaaccuaaL96 | 1928 | VPusUfsaggu(Tgn)ggauUfuUfcguagccsgsu | 2037 |
| | 886876.1 | | | | |
| APP | AD- | gsgscua(Chd)gadAadAuccaaccuaaL96 | 1929 | VPusUfsaggu(Tgn)ggaudTuUfcguagccsgsu | 2038 |
| | 886877.1 | | | | |
| APP | AD- | gsgscua(Chd)gaAfAfAfuccaaccuaaL96 | 1930 | VPusUfsaggu(Tgn)ggauuuUfcguagccsgsu | 2039 |
| | 886878.1 | | | | |
| APP | AD- | gsgscua(Chd)gaAfAfAfuccaaccuaaL96 | 1931 | VPusUfsaggu(Tgn)ggauuuUfcdGuagccsgsu | 2040 |
| | 886879.1 | | | | |
| APP | AD- | gsgscua(Chd)gaAfAfAfuccaaccuaaL96 | 1932 | VPusUfsaggu(Tgn)ggaudTuUfcdGuagccsgsu | 2041 |
| | 886880.1 | | | | |
| APP | AD- | gsgscua(Chd)gaAfAfAfuccaaccuaaL96 | 1933 | VPusUfsaggu(Tgn)ggaudTuUfcguagccsgsu | 2042 |
| | 886881.1 | | | | |
| APP | AD- | gsgscua(Chd)gaAfAfAfuccaaccuaaL96 | 1934 | VPuUfaggdT(Tgn)ggauuuUfcguagccsgsu | 2043 |
| | 886882.1 | | | | |
| APP | AD- | gsgscua(Chd)gaAfAfAfuccaaccuaaL96 | 1935 | VPuUfaggdT(Tgn)ggauuuUfcdGuagccsgsu | 2044 |
| | 886883.1 | | | | |
| APP | AD- | gsgscua(Chd)gaAfAfAfuccaaccuaaL96 | 1936 | VPuUfaggdT(Tgn)ggaudTuUfcdGuagccsgsu | 2045 |
| | 886884.1 | | | | |
| APP | AD- | gsgscua(Chd)gaAfAfAfuccaaccuaaL96 | 1937 | VPuUfaggdT(Tgn)ggaudTuUfcguagccsgsu | 2046 |
| | 886885.1 | | | | |
| APP | AD- | gsgscua(Chd)gaAfAfAfuccaaccuaaL96 | 1938 | VPuUfagdGu(Tgn)ggauuuUfcguagccsgsu | 2047 |
| | 886886.1 | | | | |
| APP | AD- | gsgscua(Chd)gaAfAfAfuccaaccuaaL96 | 1939 | VPuUfagdGu(Tgn)ggauuuUfcdGuagccsgsu | 2048 |
| | 886887.1 | | | | |
| APP | AD- | gsgscua(Chd)gaAfAfAfuccaaccuaaL96 | 1940 | VPuUfagdGu(Tgn)ggaudTuUfcdGuagccsgsu | 2049 |
| | 886888.1 | | | | |
| APP | AD- | gsgscua(Chd)gaAfAfAfuccaaccuaaL96 | 1941 | VPuUfagdGu(Tgn)ggaudTuUfcguagccsgsu | 2050 |
| | 886889.1 | | | | |
| APP | AD- | gsgscua(Chd)GfaAfAfAfuccaaccuaaL96 | 1942 | VPusUfsaggu(Tgn)ggauuuUfcGfuagccsusg | 2051 |
| | 886890.1 | | | | |
| APP | AD- | gsgscua(Chd)gaAfAfAfuccaaccuaaL96 | 1943 | VPusUfsaggu(Tgn)ggauuuUfcdGuagccsusg | 2052 |
| | 886891.1 | | | | |
| APP | AD- | gsgscua(Chd)gaAfAfAfuccaaccuaaL96 | 1944 | VPuUfaggdT(Tgn)ggaudTuUfcdGuagccsusg | 2053 |
| | 886892.1 | | | | |
| APP | AD- | gsgscua(Chd)gaAfAfAfuccaaccuaaL96 | 1945 | VPuUfagdGu(Tgn)ggaudTuUfcdGuagccsusg | 2054 |
| | 886893.1 | | | | |
| APP | AD- | asasaga(Ghd)CfaAfAfAfcuauucagaaL96 | 1946 | VPusUfscugAfaUfAfguuuUfgCfucuuuscsu | 2055 |
| | 886894.1 | | | | |
| APP | AD- | asasag(Ahd)gCfaAfAfAfcuauucagaaL96 | 1947 | VPusUfscugAfaUfAfguuuUfgCfucuuuscsu | 2056 |
| | 886895.1 | | | | |
| APP | AD- | asasagag(Chd)aAfAfAfcuauucagaaL96 | 1948 | VPusUfscugAfaUfAfguuuUfgCfucuuuscsu | 2057 |
| | 886896.1 | | | | |
| APP | AD- | asasagagCfaAfAfAfcua(Uhd)ucagaaL96 | 1949 | VPusUfscugAfaUfAfguuuUfgCfucuuuscsu | 2058 |
| | 886897.1 | | | | |
| APP | AD- | asasagagCfaAfAfAfcuau(Uhd)cagaaL96 | 1950 | VPusUfscugAfaUfAfguuuUfgCfucuuuscsu | 2059 |
| | 886898.1 | | | | |
| APP | AD- | asasagagCfaAfAfAfcuauu(Chd)agaaL96 | 1951 | VPusUfscugAfaUfAfguuuUfgCfucuuuscsu | 2060 |
| | 886899.1 | | | | |
| APP | AD- | asasaga(Ghd)CfaAfAfAfcuauucagaaL96 | 1952 | VPusUfscugAfauaguuuUfgCfucuuuscsu | 2061 |
| | 886900.1 | | | | |
| APP | AD- | asasaga(Ghd)CfaAfAfAfcuauucagaaL96 | 1953 | VPuUfcugAfaUfAfguuuUfgCfucuuuscsu | 2062 |
| | 886901.1 | | | | |
| APP | AD- | asasaga(Ghd)CfaAfAfAfcuauucagaaL96 | 1954 | VPuUfcugAfauaguuuUfgCfucuuuscsu | 2063 |
| | 886902.1 | | | | |
| APP | AD- | asasag(Ahd)gCfaAfAfAfcuauucagaaL96 | 1955 | VPuUfcugAfaUfAfguuuUfgCfucuuuscsu | 2064 |
| | 886903.1 | | | | |
| APP | AD- | asasag(Ahd)gCfaAfAfAfcuauucagaaL96 | 1956 | VPuUfcugAfauaguuuUfgCfucuuuscsu | 2065 |
| | 886904.1 | | | | |
| APP | AD- | asasagag(Chd)aAfAfAfcuauucagaaL96 | 1957 | VPuUfcugAfaUfAfguuuUfgCfucuuuscsu | 2066 |
| | 886905.1 | | | | |
| APP | AD- | asasagag(Chd)aAfAfAfcuauucagaaL96 | 1958 | VPuUfcugAfauaguuuUfgCfucuuuscsu | 2067 |
| | 886906.1 | | | | |
| APP | AD- | asasagag(Chd)aAfaAfcuauucagaaL96 | 1959 | VPuUfcugAfauagudTuUfgCfucuuuscsu | 2068 |
| | 886907.1 | | | | |
| APP | AD- | asasagag(Chd)adAadAcuauucagaaL96 | 1960 | VPuUfcugAfauagudTuUfgCfucuuuscsu | 2069 |
| | 886908.1 | | | | |
| APP | AD- | asasagag(Chd)adAadAcuauucagaaL96 | 1961 | VPuUfcugdAauagudTuUfgdCucuuuscsu | 2070 |
| | 886909.1 | | | | |
| APP | AD- | asasaga(Ghd)CfaAfAfAfcuauucagaaL96 | 1962 | VPusUfscugAfauaguuuUfgCfucuuususg | 2071 |
| | 886910.1 | | | | |
| APP | AD- | asasagagCfaAfAfAfcua(Uhd)ucagaaL96 | 1963 | VPuUfcugAfauaguuuUfgCfucuuususg | 2072 |
| | 886911.1 | | | | |
| APP | AD- | asasagag(Chd)aAfAfAfcuauucagaaL96 | 1964 | VPuUfcugAfauaguuuUfgCfucuuususg | 2073 |
| | 886912.1 | | | | |
| APP | AD- | ususuau(Ghd)AfuUfUfAfcucauuaucaL96 | 1965 | VPusGfsauaAfuGfAfguaaAfuCfauaaasasc | 2074 |
| | 886913.1 | | | | |
| APP | AD- | ususua(Uhd)gAfuUfUfAfcucauuaucaL96 | 1966 | VPusGfsauaAfuGfAfguaaAfuCfauaaasasc | 2075 |
| | 886914.1 | | | | |
| APP | AD- | ususuaug(Ahd)uUfUfAfcucauuaucaL96 | 1967 | VPusGfsauaAfuGfAfguaaAfuCfauaaasasc | 2076 |
| | 886915.1 | | | | |
| APP | AD- | ususuaugAfuUfUfAfcuc(Ahd)uuaucaL96 | 1968 | VPusGfsauaAfuGfAfguaaAfuCfauaaasasc | 2077 |
| | 886916.1 | | | | |
| APP | AD- | ususuaugAfuUfUfAfcuca(Uhd)uaucaL 96 | 1969 | VPusGfsauaAfuGfAfguaaAfuCfauaaasasc | 2078 |
| | 886917.1 | | | | |
| APP | AD- | ususuaugAfuUfUfAfcucau(Uhd)aucaL96 | 1970 | VPusGfsauaAfuGfAfguaaAfuCfauaaasasc | 2079 |
| | 886918.1 | | | | |
| APP | AD- | ususuau(Ghd)AfuUfUfAfcucauuaucaL96 | 1971 | VPusGfsauaAfugaguaaAfuCfauaaasasc | 2080 |
| | 886919.1 | | | | |
| APP | AD- | ususuau(Ghd)AfuUfUfAfcucauuaucaL96 | 1972 | VPusdGsauaAfugaguaaAfuCfauaaasasc | 2081 |
| | 886920.1 | | | | |
| APP | AD- | ususuau(Ghd)AfuUfUfAfcucauuaucaL96 | 1973 | VPudGauaAfugaguaaAfuCfauaaasasc | 2082 |
| | 886921.1 | | | | |
| APP | AD- | ususua(Uhd)gAfuUfUfAfcucauuaucaL96 | 1974 | VPusdGsauaAfugaguaaAfuCfauaaasasc | 2083 |
| | 886922.1 | | | | |
| APP | AD- | ususua(Uhd)gAfuUfUfAfcucauuaucaL96 | 1975 | VPudGauaAfugaguaaAfuCfauaaasasc | 2084 |
| | 886923.1 | | | | |
| APP | AD- | ususuaug(Ahd)uUfUfAfcucauuaucaL96 | 1976 | VPusdGsauaAfugaguaaAfuCfauaaasasc | 2085 |
| | 886924.1 | | | | |
| APP | AD- | ususuaug(Ahd)uUfUfAfcucauuaucaL96 | 1977 | VPudGauaAfugaguaaAfuCfauaaasasc | 2086 |
| | 886925.1 | | | | |
| APP | AD- | ususuaug(Ahd)uUfuAfcucauuaucaL96 | 1978 | VPudGauadAugagudAaAfuCfauaaasasc | 2087 |
| | 886926.1 | | | | |
| APP | AD- | ususuaug(Ahd)uUfudAcucauuaucaL96 | 1979 | VPudGauadAugagudAaAfuCfauaaasasc | 2088 |
| | 886927.1 | | | | |
| APP | AD- | ususuaug(Ahd)uUfudAcucauuaucaL96 | 1980 | VPudGauadAugagudAaAfudCauaaasasc | 2089 |
| | 886928.1 | | | | |
| APP | AD- | ususuau(Ghd)AfuUfUfAfcucauuaucaL96 | 1981 | VPusGfsauaAfugaguaaAfuCfauaaasusg | 2090 |
| | 886929.1 | | | | |
| APP | AD- | ususuaugAfuUfUfAfcuc(Ahd)uuaucaL96 | 1982 | VPusdGsauaAfugaguaaAfuCfauaaasusg | 2091 |
| | 886930.1 | | | | |
| APP | AD- | ususuaug(Ahd)uUfUfAfcucauuaucaL96 | 1983 | VPusdGsauaAfugaguaaAfuCfauaaasusg | 2092 |
| | 886931.1 | | | | |

Table 11 key:
U = uridine-3′-phosphate,
u = 2′-O-methyluridine-3′-phosphate,
us = 2′-O-methyluridine-3′-phosphorothioate,
a = 2′-O-methyladenosine-3′-phosphate,
A = adenosine-3′-phosphate,
as = 2′-O-methyladenosine-3′-phosphorothioate,
(Ahd) = 2′-O-hexadecyl-adenosine-3′-phosphate,
Gf = 2′-fluoroguanosine-3′-phosphate,
Uf = 2′-fluorouridine-3′-phosphate,
Cf = 2′-fluorocytidine-3′-phosphate,
Af = 2′-fluoroadenosine-3′-phosphate,
cs = 2′-O-methylcytidine-3′-phosphate,
VP = Vinylphosphate 5′,
(Agn) = Adenosine-glycol nucleic acid (GNA),
gs = 2′-O-methylguanosine-3′-phosphorothioate,
(Chd) = 2′-O-hexadecyl-cytidine-3′-phosphate,
(Tgn) = Thymidine-glycol nucleic acid (GNA) S-Isomer,
(Ghd) = 2′-O-hexadecyl-guanosine-3′-phosphate,
and
cs = 2′-O-methylcytidine-3′-phosphorothioate.

TABLE 12
Additional APP-Targeting RNAi Agents, Unmodified Sequences.

| | | SEQ | | SEQ |
|---|---|---|---|---|
| Duplex | Sense Sequence | ID | Antisense Sequence | ID |
| Name | (5′ to 3′) | NO | (5′ to 3′) | NO |
| AD- | UAGUGCAUGAAUAGAUUCUCA | 2093 | UGAGAATCUAUUCAUGCACUAGU | 2202 |
| 886823.1 | | | | |
| AD- | UAGUGCAUGAAUAGAUUCUCA | 2094 | UGAGAATCUAUUCAUGCACUAGU | 2203 |
| 886824.1 | | | | |
| AD- | UAGUGCAUGAAUAGAUUCUCA | 2095 | UGAGAATCUAUUCAUGCACUAGU | 2204 |
| 886825.1 | | | | |
| AD- | UAGUGCAUGAAUAGAUUCUCA | 2096 | UGAGAATCUAUUCAUGCACUAGU | 2205 |
| 886826.1 | | | | |
| AD- | UAGUGCAUGAAUAGAUUCUCA | 2097 | UGAGAATCUAUUCAUGCACUAGU | 2206 |
| 886827.1 | | | | |
| AD- | UAGUGCAUGAAUAGAUUCUCA | 2098 | UGAGAATCUAUUCAUGCACUAGU | 2207 |
| 886828.1 | | | | |
| AD- | UAGUGCAUGAAUAGAUUCUCA | 2099 | UGAGAATCUAUUCAUGCACUAGU | 2208 |
| 886829.1 | | | | |
| AD- | UAGUGCAUGAAUAGAUUCUCA | 2100 | UGAGAATCUAUTCAUGCACUAGU | 2209 |
| 886830.1 | | | | |
| AD- | UAGUGCAUGAAUAGAUUCUCA | 2101 | UGAGAATCUAUTCAUGCACUAGU | 2210 |
| 886831.1 | | | | |
| AD- | UAGUGCAUGAAUAGAUUCUCA | 2102 | UGAGAATCUAUUCAUGCACUAGU | 2211 |
| 886832.1 | | | | |
| AD- | UAGUGCAUGAAUAGAUUCUCA | 2103 | UGAGAATCUAUTCAUGCACUAGU | 2212 |
| 886833.1 | | | | |
| AD- | UAGUGCAUGAAUAGAUUCUCA | 2104 | UGAGAATCUAUUCAUGCACUAGU | 2213 |
| 886834.1 | | | | |
| AD- | UAGUGCAUGAAUAGAUUCUCA | 2105 | UGAGAATCUAUUCAUGCACUAGU | 2214 |
| 886836.1 | | | | |
| AD- | UAGUGCAUGAAUAGAUUCUCA | 2106 | UGAGAATCUAUTCAUGCACUAGU | 2215 |
| 886837.1 | | | | |
| AD- | UAGUGCAUGAAUAGAUUCUCA | 2107 | UGAGAATCUAUTCAUGCACUAGU | 2216 |
| 886838.1 | | | | |
| AD- | UAGUGCAUGAAUAGAUUCUCA | 2108 | UGAGAATCUAUUCAUGCACUAGU | 2217 |
| 886839.1 | | | | |
| AD- | UAGUGCAUGAAUAGAUUCUCA | 2109 | UGAGAATCUAUUCAUGCACUAGU | 2218 |
| 886839.2 | | | | |
| AD- | UAGUGCAUGAAUAGAUUCUCA | 2110 | UGAGAATCUAUTCAUGCACUAGU | 2219 |
| 886840.1 | | | | |
| AD- | UAGUGCAUGAAUAGAUUCUCA | 2111 | UGAGAATCUAUTCAUGCACUAGU | 2220 |
| 886841.1 | | | | |
| AD- | UAGUGCAUGAAUAGAUUCUCA | 2112 | UGAGAATCUAUTCAUGCACUAGU | 2221 |
| 886842.1 | | | | |
| AD- | UAGUGCAUGAAUAGAUUCUCA | 2113 | UGAGAATCUAUTCAUGCACUAGU | 2222 |
| 886843.1 | | | | |
| AD- | UAGUGCAUGAAUAGAUUCUCA | 2114 | UGAGAATCUAUTCAUGCACUAGU | 2223 |
| 886844.1 | | | | |
| AD- | UAGUGCAUGAAUAGAUUCUCA | 2115 | UGAGAATCUAUUCAUGCACUAGU | 2224 |
| 886845.1 | | | | |
| AD- | UAGUGCAUGAAUAGAUUCUCA | 2116 | UGAGAAUCUAUUCAUGCACUAGU | 2225 |
| 886846.1 | | | | |
| AD- | UAGUGCAUGAAUAGAUUCUCA | 2117 | UGAGAATCUAUUCAUGCACUAGU | 2226 |
| 886847.1 | | | | |
| AD- | UAGUGCAUGAAUAGAUUCUCA | 2118 | UGAGAATCUAUUCAUGCACUAGU | 2227 |
| 886848.1 | | | | |
| AD- | UAGUGCAUGAAUAGAUUCUCA | 2119 | UGAGAATCUAUUCAUGCACUAGU | 2228 |
| 886849.1 | | | | |
| AD- | UAGUGCAUGAAUAGAUUCUCA | 2120 | UGAGAATCUAUTCAUGCACUAGU | 2229 |
| 886850.1 | | | | |
| AD- | UAGUGCAUGAAUAGAUUCUCA | 2121 | UGAGAATCUAUTCAUGCACUAGU | 2230 |
| 886851.1 | | | | |
| AD- | UAGUGCAUGAAUAGAUUCUCA | 2122 | UGAGAATCUAUTCAUGCACUAGU | 2231 |
| 886852.1 | | | | |
| AD- | UAGUGCAUGAAUAGAUUCUCA | 2123 | UGAGAATCUAUTCAUGCACUAGU | 2232 |
| 886853.1 | | | | |
| AD- | UAGUGCAUGAAUAGAUUCUCA | 2124 | UGAGAATCUAUTCAUGCACUAGU | 2233 |
| 886854.1 | | | | |
| AD- | UAGUGCAUGAAUAGAUUCUCA | 2125 | UGAGAATCUAUUCAUGCACUAGU | 2234 |
| 886855.1 | | | | |
| AD- | UAGUGCAUGAAUAGAUUCUCA | 2126 | UGAGAATCUAUUCAUGCACUAGU | 2235 |
| 886856.1 | | | | |
| AD- | UAGUGCAUGAAUAGAUUCUCA | 2127 | UGAGAATCUAUTCAUGCACUAGU | 2236 |
| 886857.1 | | | | |
| AD- | UAGUGCAUGAAUAGAUUCUCA | 2128 | UGAGAATCUAUTCAUGCACUAGU | 2237 |
| 886858.1 | | | | |
| AD- | UAGUGCAUGAAUAGAUUCUCA | 2129 | UGAGAATCUAUTCAUGCACUAGU | 2238 |
| 886859.1 | | | | |
| AD- | UAGUGCAUGAAUAGAUUCUCA | 2130 | UGAGAATCUAUTCAUGCACUAGU | 2239 |
| 886860.1 | | | | |
| AD- | UAGUGCAUGAAUAGAUUCUCA | 2131 | UGAGAATCUAUUCAUGCACUAUG | 2240 |
| 886861.1 | | | | |
| AD- | UAGUGCAUGAAUAGAUUCUCA | 2132 | UGAGAATCUAUTCAUGCACUAUG | 2241 |
| 886862.1 | | | | |
| AD- | UAGUGCAUGAAUAGAUUCUCA | 2133 | UGAGAATCUAUTCAUGCACUAUG | 2242 |
| 886863.1 | | | | |
| AD- | GGCUACGAAAAUCCAACCUAA | 2134 | UUAGGUTGGAUUUUCGUAGCCGU | 2243 |
| 886864.1 | | | | |
| AD- | GGCUACGAAAAUCCAACCUAA | 2135 | UUAGGUTGGAUUUUCGUAGCCGU | 2244 |
| 886865.1 | | | | |
| AD- | GGCUACGAAAAUCCAACCUAA | 2136 | UUAGGUTGGAUUUUCGUAGCCGU | 2245 |
| 886866.1 | | | | |
| AD- | GGCUACGAAAAUCCAACCUAA | 2137 | UUAGGUTGGAUUUUCGUAGCCGU | 2246 |
| 886867.1 | | | | |
| AD- | GGCUACGAAAAUCCAACCUAA | 2138 | UUAGGUTGGAUUUUCGUAGCCGU | 2247 |
| 886868.1 | | | | |
| AD- | GGCUACGAAAAUCCAACCUAA | 2139 | UUAGGUTGGAUUUUCGUAGCCGU | 2248 |
| 886869.1 | | | | |
| AD- | GGCUACGAAAAUCCAACCUAA | 2140 | UUAGGUTGGAUTUUCGUAGCCGU | 2249 |
| 886870.1 | | | | |
| AD- | GGCUACGAAAAUCCAACCUAA | 2141 | UUAGGUTGGAUTUUCGUAGCCGU | 2250 |
| 886871.1 | | | | |
| AD- | GGCUACGAAAAUCCAACCUAA | 2142 | UUAGGUTGGAUUUUCGUAGCCGU | 2251 |
| 886872.1 | | | | |
| AD- | GGCUACGAAAAUCCAACCUAA | 2143 | UUAGGUTGGAUTUUCGUAGCCGU | 2252 |
| 886873.1 | | | | |
| AD- | GGCUACGAAAAUCCAACCUAA | 2144 | UUAGGUTGGAUTUUCGUAGCCGU | 2253 |
| 886874.1 | | | | |
| AD- | GGCUACGAAAAUCCAACCUAA | 2145 | UUAGGUTGGAUTUUCGUAGCCGU | 2254 |
| 886875.1 | | | | |
| AD- | GGCUACGAAAAUCCAACCUAA | 2146 | UUAGGUTGGAUUUUCGUAGCCGU | 2255 |
| 886876.1 | | | | |
| AD- | GGCUACGAAAAUCCAACCUAA | 2147 | UUAGGUTGGAUTUUCGUAGCCGU | 2256 |
| 886877.1 | | | | |
| AD- | GGCUACGAAAAUCCAACCUAA | 2148 | UUAGGUTGGAUUUUCGUAGCCGU | 2257 |
| 886878.1 | | | | |
| AD- | GGCUACGAAAAUCCAACCUAA | 2149 | UUAGGUTGGAUUUUCGUAGCCGU | 2258 |
| 886879.1 | | | | |
| AD- | GGCUACGAAAAUCCAACCUAA | 2150 | UUAGGUTGGAUTUUCGUAGCCGU | 2259 |
| 886880.1 | | | | |
| AD- | GGCUACGAAAAUCCAACCUAA | 2151 | UUAGGUTGGAUTUUCGUAGCCGU | 2260 |
| 886881.1 | | | | |
| AD- | GGCUACGAAAAUCCAACCUAA | 2152 | UUAGGTTGGAUUUUCGUAGCCGU | 2261 |
| 886882.1 | | | | |
| AD- | GGCUACGAAAAUCCAACCUAA | 2153 | UUAGGTTGGAUUUUCGUAGCCGU | 2262 |
| 886883.1 | | | | |
| AD- | GGCUACGAAAAUCCAACCUAA | 2154 | UUAGGTTGGAUTUUCGUAGCCGU | 2263 |
| 886884.1 | | | | |
| AD- | GGCUACGAAAAUCCAACCUAA | 2155 | UUAGGTTGGAUTUUCGUAGCCGU | 2264 |
| 886885.1 | | | | |
| AD- | GGCUACGAAAAUCCAACCUAA | 2156 | UUAGGUTGGAUUUUCGUAGCCGU | 2265 |
| 886886.1 | | | | |
| AD- | GGCUACGAAAAUCCAACCUAA | 2157 | UUAGGUTGGAUUUUCGUAGCCGU | 2266 |
| 886887.1 | | | | |
| AD- | GGCUACGAAAAUCCAACCUAA | 2158 | UUAGGUTGGAUTUUCGUAGCCGU | 2267 |
| 886888.1 | | | | |
| AD- | GGCUACGAAAAUCCAACCUAA | 2159 | UUAGGUTGGAUTUUCGUAGCCGU | 2268 |
| 886889.1 | | | | |
| AD- | GGCUACGAAAAUCCAACCUAA | 2160 | UUAGGUTGGAUUUUCGUAGCCUG | 2269 |
| 886890.1 | | | | |
| AD- | GGCUACGAAAAUCCAACCUAA | 2161 | UUAGGUTGGAUUUUCGUAGCCUG | 2270 |
| 886891.1 | | | | |
| AD- | GGCUACGAAAAUCCAACCUAA | 2162 | UUAGGTTGGAUTUUCGUAGCCUG | 2271 |
| 886892.1 | | | | |
| AD- | GGCUACGAAAAUCCAACCUAA | 2163 | UUAGGUTGGAUTUUCGUAGCCUG | 2272 |
| 886893.1 | | | | |
| AD- | AAAGAGCAAAACUAUUCAGAA | 2164 | UUCUGAAUAGUUUUGCUCUUUCU | 2273 |
| 886894.1 | | | | |
| AD- | AAAGAGCAAAACUAUUCAGAA | 2165 | UUCUGAAUAGUUUUGCUCUUUCU | 2274 |
| 886895.1 | | | | |
| AD- | AAAGAGCAAAACUAUUCAGAA | 2166 | UUCUGAAUAGUUUUGCUCUUUCU | 2275 |
| 886896.1 | | | | |
| AD- | AAAGAGCAAAACUAUUCAGAA | 2167 | UUCUGAAUAGUUUUGCUCUUUCU | 2276 |
| 886897.1 | | | | |
| AD- | AAAGAGCAAAACUAUUCAGAA | 2168 | UUCUGAAUAGUUUUGCUCUUUCU | 2277 |
| 886898.1 | | | | |
| AD- | AAAGAGCAAAACUAUUCAGAA | 2169 | UUCUGAAUAGUUUUGCUCUUUCU | 2278 |
| 886899.1 | | | | |
| AD- | AAAGAGCAAAACUAUUCAGAA | 2170 | UUCUGAAUAGUUUUGCUCUUUCU | 2279 |
| 886900.1 | | | | |
| AD- | AAAGAGCAAAACUAUUCAGAA | 2171 | UUCUGAAUAGUUUUGCUCUUUCU | 2280 |
| 886901.1 | | | | |
| AD- | AAAGAGCAAAACUAUUCAGAA | 2172 | UUCUGAAUAGUUUUGCUCUUUCU | 2281 |
| 886902.1 | | | | |
| AD- | AAAGAGCAAAACUAUUCAGAA | 2173 | UUCUGAAUAGUUUUGCUCUUUCU | 2282 |
| 886903.1 | | | | |
| AD- | AAAGAGCAAAACUAUUCAGAA | 2174 | UUCUGAAUAGUUUUGCUCUUUCU | 2283 |
| 886904.1 | | | | |
| AD- | AAAGAGCAAAACUAUUCAGAA | 2175 | UUCUGAAUAGUUUUGCUCUUUCU | 2284 |
| 886905.1 | | | | |
| AD- | AAAGAGCAAAACUAUUCAGAA | 2176 | UUCUGAAUAGUUUUGCUCUUUCU | 2285 |
| 886906.1 | | | | |
| AD- | AAAGAGCAAAACUAUUCAGAA | 2177 | UUCUGAAUAGUTUUGCUCUUUCU | 2286 |
| 886907.1 | | | | |
| AD- | AAAGAGCAAAACUAUUCAGAA | 2178 | UUCUGAAUAGUTUUGCUCUUUCU | 2287 |
| 886908.1 | | | | |
| AD- | AAAGAGCAAAACUAUUCAGAA | 2179 | UUCUGAAUAGUTUUGCUCUUUCU | 2288 |
| 886909.1 | | | | |
| AD- | AAAGAGCAAAACUAUUCAGAA | 2180 | UUCUGAAUAGUUUUGCUCUUUUG | 2289 |
| 886910.1 | | | | |
| AD- | AAAGAGCAAAACUAUUCAGAA | 2181 | UUCUGAAUAGUUUUGCUCUUUUG | 2290 |
| 886911.1 | | | | |
| AD- | AAAGAGCAAAACUAUUCAGAA | 2182 | UUCUGAAUAGUUUUGCUCUUUUG | 2291 |
| 886912.1 | | | | |
| AD- | UUUAUGAUUUACUCAUUAUCA | 2183 | UGAUAAUGAGUAAAUCAUAAAAC | 2292 |
| 886913.1 | | | | |
| AD- | UUUAUGAUUUACUCAUUAUCA | 2184 | UGAUAAUGAGUAAAUCAUAAAAC | 2293 |
| 886914.1 | | | | |
| AD- | UUUAUGAUUUACUCAUUAUCA | 2185 | UGAUAAUGAGUAAAUCAUAAAAC | 2294 |
| 886915.1 | | | | |
| AD- | UUUAUGAUUUACUCAUUAUCA | 2186 | UGAUAAUGAGUAAAUCAUAAAAC | 2295 |
| 886916.1 | | | | |
| AD- | UUUAUGAUUUACUCAUUAUCA | 2187 | UGAUAAUGAGUAAAUCAUAAAAC | 2296 |
| 886917.1 | | | | |
| AD- | UUUAUGAUUUACUCAUUAUCA | 2188 | UGAUAAUGAGUAAAUCAUAAAAC | 2297 |
| 886918.1 | | | | |
| AD- | UUUAUGAUUUACUCAUUAUCA | 2189 | UGAUAAUGAGUAAAUCAUAAAAC | 2298 |
| 886919.1 | | | | |
| AD- | UUUAUGAUUUACUCAUUAUCA | 2190 | UGAUAAUGAGUAAAUCAUAAAAC | 2299 |
| 886920.1 | | | | |
| AD- | UUUAUGAUUUACUCAUUAUCA | 2191 | UGAUAAUGAGUAAAUCAUAAAAC | 2300 |
| 886921.1 | | | | |
| AD- | UUUAUGAUUUACUCAUUAUCA | 2192 | UGAUAAUGAGUAAAUCAUAAAAC | 2301 |
| 886922.1 | | | | |
| AD- | UUUAUGAUUUACUCAUUAUCA | 2193 | UGAUAAUGAGUAAAUCAUAAAAC | 2302 |
| 886923.1 | | | | |
| AD- | UUUAUGAUUUACUCAUUAUCA | 2194 | UGAUAAUGAGUAAAUCAUAAAAC | 2303 |
| 886924.1 | | | | |
| AD- | UUUAUGAUUUACUCAUUAUCA | 2195 | UGAUAAUGAGUAAAUCAUAAAAC | 2304 |
| 886925.1 | | | | |
| AD- | UUUAUGAUUUACUCAUUAUCA | 2196 | UGAUAAUGAGUAAAUCAUAAAAC | 2305 |
| 886926.1 | | | | |
| AD- | UUUAUGAUUUACUCAUUAUCA | 2197 | UGAUAAUGAGUAAAUCAUAAAAC | 2306 |
| 886927.1 | | | | |
| AD- | UUUAUGAUUUACUCAUUAUCA | 2198 | UGAUAAUGAGUAAAUCAUAAAAC | 2307 |
| 886928.1 | | | | |
| AD- | UUUAUGAUUUACUCAUUAUCA | 2199 | UGAUAAUGAGUAAAUCAUAAAUG | 2308 |
| 886929.1 | | | | |
| AD- | UUUAUGAUUUACUCAUUAUCA | 2200 | UGAUAAUGAGUAAAUCAUAAAUG | 2309 |
| 886930.1 | | | | |
| AD- | UUUAUGAUUUACUCAUUAUCA | 2201 | UGAUAAUGAGUAAAUCAUAAAUG | 2310 |
| 886931.1 | | | | |

TABLE 13
Additional Human APP-Targeting RNAi Agents,
Modified Sense Sequences and Targets.

| | | Sense | SEQ | mRNA | SEQ |
|---|---|---|---|---|---|
| Duplex | | Sequence | ID | Target | ID |
| Name | target | (5′ to 3′) | NO | Sequence | NO |
| AD- | APP | gsgscua(Chd)ga | 2311 | GGCUACGAAAA | 2315 |
| 961583 | | dAadAuccaaccus | | UCCAACCUAA | |
| | | asa | | | |
| AD- | APP | asasagag(Chd)a | 2312 | AAAGAGCAAAA | 2316 |
| 961584 | | AfaAfcuauucags | | CUAUUCAGAA | |
| | | asa | | | |
| AD- | APP | asasagag(Chd)a | 2313 | AAAGAGCAAAA | 2317 |
| 961585 | | dAadAcuauucags | | CUAUUCAGAA | |
| | | asa | | | |
| AD- | APP | ususuau(Ghd)Af | 2314 | UUUAUGAUUUA | 2318 |
| 961586 | | uUfUfAfcucauua | | CUCAUUAUCA | |
| | | uscsa | | | |

Table 13 key:
U = uridine-3′-phosphate,
u = 2′-O-methyluridine-3′-phosphate,
us = 2′-O-methyluridine-3′-phosphorothioate,
a = 2′-O-methyladenosine-3′-phosphate,
A = adenosine-3′-phosphate,
as = 2′-O-methyladenosine-3′-phosphorothioate,
(Ahd) = 2′-O-hexadecyl-adenosine-3′-phosphate,
Gf = 2′-fluoroguanosine-3′-phosphate,
Uf = 2′-fluorouridine-3′-phosphate,
Cf = 2′-fluorocytidine-3′-phosphate,
Af = 2′-fluoroadenosine-3′-phosphate,
cs = 2′-O-methylcytidine-3′-phosphate,
VP = Vinylphosphate 5′,
(Agn) = Adenosine-glycol nucleic acid (GNA),
gs = 2′-O-methylguanosine-3′-phosphorothioate,
(Chd) = 2′-O-hexadecyl-cytidine-3′-phosphate,
(Tgn) = Thymidine-glycol nucleic acid (GNA) S-Isomer,
(Ghd) = 2′-O-hexadecyl-guanosine-3′-phosphate,
and
cs = 2′-O-methylcytidine-3′-phosphorothioate.

TABLE 14
Additional Human APP-Targeting RNAi Agents,
Modified Antisense Sequences and Targets

| | | Antisense | SEQ | mRNA | SEQ |
|---|---|---|---|---|---|
| Duplex | | Sequence | ID | Target | ID |
| Name | target | (5′ to 3′) | NO | Sequence | NO |
| AD- | APP | VPusUfsaggu(Tgn) | 2319 | UUAGGUTGGAU | 2323 |
| 961583 | | ggaudTuUfcdGuagc | | TUUCGUAGCCG | |
| | | csgsu | | U | |
| AD- | APP | VPuUfcugAfauagud | 2320 | UUCUGAAUAGU | 2324 |
| 961584 | | TuUfgCfucuuuscsu | | TUUGCUCUUUC | |
| | | | | U | |
| AD- | APP | VPuUfcugdAauagud | 2321 | UUCUGAAUAGU | 2325 |
| 961585 | | TuUfgdCucuuuscsu | | TUUGCUCUUUC | |
| | | | | U | |
| AD- | APP | VPusGfsauaAfugag | 2322 | UGAUAAUGAGU | 2326 |
| 961586 | | uaaAfuCfauaaasus | | AAAUCAUAAAU | |
| | | g | | G | |

Table 14 key:
U = uridine-3′-phosphate,
u = 2′-O-methyluridine-3′-phosphate,
us = 2′-O-methyluridine-3′-phosphorothioate,
a = 2′-O-methyladenosine-3′-phosphate,
A = adenosine-3′-phosphate,
as = 2′-O-methyladenosine-3′-phosphorothioate,
(Ahd) = 2′-O-hexadecyl-adenosine-3′-phosphate,
Gf = 2′-fluoroguanosine-3′-phosphate,
Uf = 2′-fluorouridine-3′-phosphate,
Cf = 2′-fluorocytidine-3′-phosphate,
Af = 2′-fluoroadenosine-3′-phosphate,
cs = 2′-O-methylcytidine-3′-phosphate,
VP = Vinylphosphate 5′,
(Agn) = Adenosine-glycol nucleic acid (GNA),
gs = 2′-O-methylguanosine-3′-phosphorothioate,
(Chd) = 2′-O-hexadecyl-cytidine-3′-phosphate,
(Tgn) = Thymidine-glycol nucleic acid (GNA) S-Isomer,
(Ghd) = 2′-O-hexadecyl-guanosine-3′-phosphate,
and
cs = 2′-O-methylcytidine-3′-phosphorothioate.

TABLE 15
hsAPP-Targeting RNAi Agents, Duplex and Target
Sequences for GNA7 C16 control and AU-rich Candidates.

| | | | SEQ | | SEQ | mRNA target | SEQ |
|---|---|---|---|---|---|---|---|
| Chemistry | Duplex | Sense | ID | Antisense | ID | sequence | ID |
| (Target) | Name | Sequence (5′ to 3′) | NO | Sequence (5′ to 3′) | NO | (5′ to 3′) | NO |
| GNA7 | AD- | usasgug(Chd)AfuGfAf | 2327 | asGfsagaa(Tgn)cuauu | 2339 | n/a | n/a |
| C16 | 392927.2 | AfuagauucucuL96 | | cAfuGfcacuasgsu | | | |
| (APP) | | | | | | | |
| AU-rich | AD- | asasagagCfaAfAfAfcu | 2328 | asUfscugAfaUfAfguuu | 2340 | AGAAAGAGCAAA | 2351 |
| seed | 506935.2 | auucagauL96 | | UfgCfucuuuscsu | | ACUAUUCAGAU | |
| (APP) | | | | | | | |
| AU-rich | AD- | ususggccAfaCfAfUfga | 2329 | asUfscacUfaAfUfcaug | 2341 | UCUUGGCCAACA | 2352 |
| seed | 507065.2 | uuagugauL96 | | UfuGfgccaasgsa | | UGAUUAGUGAA | |
| (APP) | | | | | | | |
| AU-rich | AD- | uscsugggUfuGfAfCfaa | 2330 | asUfsugaUfaUfUfuguc | 2342 | GUUCUGGGUUGA | 2353 |
| seed | 507159.2 | auaucaauL96 | | AfaCfccagasasc | | CAAAUAUCAAG | |
| (APP) | | | | | | | |
| AU-rich | AD- | ususuaugAfuUfUfAfcu | 2331 | asGfsauaAfuGfAfguaa | 2343 | GUUUUAUGAUUU | 2354 |
| seed | 507538.2 | cauuaucuL96 | | AfuCfauaaasasc | | ACUCAUUAUCG | |
| (APP) | | | | | | | |
| AU-rich | AD- | asusgccuGfaAfCfUfug | 2332 | asAfsuuaAfuUfCfaagu | 2344 | AGAUGCCUGAAC | 2355 |
| seed | 507624.2 | aauuaauuL96 | | UfcAfggcauscsu | | UUGAAUUAAUC | |
| (APP) | | | | | | | |
| AU-rich | AD- | asgsaugcCfuGfAfAfcu | 2333 | asUfsaauUfcAfAfguuc | 2345 | GUAGAUGCCUGA | 2356 |
| seed | 507724.2 | ugaauuauL96 | | AfgGfcaucusasc | | ACUUGAAUUAA | |
| (APP) | | | | | | | |
| AU-rich | AD- | gscscugaAfcUfUfGfaa | 2334 | asGfsgauUfaAfUfucaa | 2346 | AUGCCUGAACUU | 2357 |
| seed | 507725.2 | uuaauccuL96 | | GfuUfcaggcsasu | | GAAUUAAUCCA | |
| (APP) | | | | | | | |
| AU-rich | AD- | gsusgguuUfgUfGfAfcc | 2335 | asUfsuaaUfuGfGfguca | 2347 | UUGUGGUUUGUG | 2358 |
| seed | 507789.2 | caauuaauL96 | | CfaAfaccacsasa | | ACCCAAUUAAG | |
| (APP) | | | | | | | |
| AU-rich | AD- | csasgaugCfuUfUfAfga | 2336 | asAfsaauCfuCfUfcuaa | 2348 | UUCAGAUGCUUU | 2359 |
| seed | 507874.2 | gagauuuuL96 | | AfgCfaucugsasa | | AGAGAGAUUUU | |
| (APP) | | | | | | | |
| AU-rich | AD- | uscsuugcCfuAfAfGfua | 2337 | asAfsaagGfaAfUfacuu | 2349 | UCUCUUGCCUAA | 2360 |
| seed | 507928.2 | uuccuuuuL96 | | AfgGfcaagasgsa | | GUAUUCCUUUC | |
| (APP) | | | | | | | |
| AU-rich | AD- | ususgcugCfuUfCfUfgc | 2338 | asAfsaauAfuAfGfcaga | 2350 | GAUUGCUGCUUC | 2361 |
| seed | 507949.2 | uauauuuuL96 | | AfgCfagcaasusc | | UGCUAUAUUUG | |
| (APP) | | | | | | | |

Table 15 key:
U = uridine-3′-phosphate,
u = 2′-O-methyluridine-3′-phosphate,
us = 2′-O-methyluridine-3′-phosphorothioate,
a = 2′-O-methyladenosine-3′-phosphate,
A = adenosine-3′-phosphate,
as = 2′-O-methyladenosine-3′-phosphorothioate,
(Ahd) = 2′-O-hexadecyl-adenosine-3′-phosphate,
Gf = 2′-fluoroguanosine-3′-phosphate,
Uf = 2′-fluorouridine-3′-phosphate,
Cf = 2′-fluorocytidine-3′-phosphate,
Af = 2′-fluoroadenosine-3′-phosphate,
cs = 2′-O-methylcytidine-3′-phosphate,
VP = Vinylphosphate 5′,
(Agn) = Adenosine-glycol nucleic acid (GNA),
gs = 2′-O-methylguanosine-3′-phosphorothioate,
(Chd) = 2′-O-hexadecyl-cytidine-3′-phosphate,
(Tgn) = Thymidine-glycol nucleic acid (GNA) S-Isomer,
(Ghd) = 2′-O-hexadecyl-guanosine-3′-phosphate,
and
cs = 2′-O-methylcytidine-3′-phosphorothioate.

TABLE 16
hsAPP-Targeting RNAi Agents, Duplex and Target Sequences for Lead Candidates.

| | | | SEQ | | SEQ |
|---|---|---|---|---|---|
| | | | ID | | ID |
| Duplex | Strand | Oligonucleotide Sequence | NO: | Target Sequence | NO: |
| AD- | Sense | usasgug(Chd)AfuGfAfAfuagauucucaL96 | 2362 | UAGUGCAUGAAUAGAUUCUCA | 2406 |
| 886823.2 | (5′ to 3′) | | | | |
| | Antisense | VPusGfsagaa(Tgn)cuauucAfuGfcacuasgsu | 2363 | UGAGAATCUAUUCAUGCACUAGU | 2407 |
| | (5′ to 3′) | | | | |
| AD- | Sense | usasgug(Chd)AfudGAfAfuagauucucaL96 | 2364 | UAGUGCAUGAAUAGAUUCUCA | 2408 |
| 886839.2 | (5′ to 3′) | | | | |
| | Antisense | VPusdGsagaa(Tgn)cuauucAfudGcacuasgsu | 2365 | UGAGAATCUAUUCAUGCACUAGU | 2409 |
| | (5′ to 3′) | | | | |
| AD- | Sense | usasgug(Chd)audGadAuagauucucaL96 | 2366 | UAGUGCAUGAAUAGAUUCUCA | 2410 |
| 886845.2 | (5′ to 3′) | | | | |
| | Antisense | VPudGagaa(Tgn)cuauUfcAfudGcacuasgsu | 2367 | UGAGAATCUAUUCAUGCACUAGU | 2411 |
| | (5′ to 3′) | | | | |
| AD- | Sense | usasgug(Chd)AfudGAfAfuagauucucaL96 | 2368 | UAGUGCAUGAAUAGAUUCUCA | 2412 |
| 886853.2 | (5′ to 3′) | | | | |
| | Antisense | VPusdGsagdAa(Tgn)cuaudTcAfugcacuasgsu | 2369 | UGAGAATCUAUTCAUGCACUAGU | 2413 |
| | (5′ to 3′) | | | | |
| AD- | Sense | usasgug(Chd)AfudGAfAfuagauucucaL96 | 2370 | UAGUGCAUGAAUAGAUUCUCA | 2414 |
| 886858.2 | (5′ to 3′) | | | | |
| | Antisense | VPudGagdAa(Tgn)cuaudTcAfudGcacuasgsu | 2371 | UGAGAATCUAUTCAUGCACUAGU | 2415 |
| | (5′ to 3′) | | | | |
| AD- | Sense | gsgscua(Chd)GfaAfAfAfuccaaccuaaL96 | 2372 | GGCUACGAAAAUCCAACCUAA | 2416 |
| 886864.2 | (5′ to 3′) | | | | |
| | Antisense | VPusUfsaggu(Tgn)ggauuuUfcGfuagccsgsu | 2373 | UUAGGUTGGAUUUUCGUAGCCGU | 2417 |
| | (5′ to 3′) | | | | |
| AD- | Sense | gsgscua(Chd)gadAadAuccaaccuaaL96 | 2374 | GGCUACGAAAAUCCAACCUAA | 2418 |
| 886873.2 | (5′ to 3′) | | | | |
| | Antisense | VPusUfsaggu(Tgn)ggaudTuUfcdGuagccsgsu | 2375 | UUAGGUTGGAUTUUCGUAGCCGU | 2419 |
| | (5′ to 3′) | | | | |
| AD- | Sense | gsgscua(Chd)gadAadAuccaaccuaaL96 | 2376 | GGCUACGAAAAUCCAACCUAA | 2420 |
| 886877.2 | (5′ to 3′) | | | | |
| | Antisense | VPusUfsaggu(Tgn)ggaudTuUfcguagccsgsu | 2377 | UUAGGUTGGAUTUUCGUAGCCGU | 2421 |
| | (5′ to 3′) | | | | |
| AD- | Sense | gsgscua(Chd)gaAfAfAfuccaaccuaaL96 | 2378 | GGCUACGAAAAUCCAACCUAA | 2422 |
| 886879.2 | (5′ to 3′) | | | | |
| | Antisense | VPusUfsaggu(Tgn)ggauuuUfcdGuagccsgsu | 2379 | UUAGGUTGGAUUUUCGUAGCCGU | 2423 |
| | (5′ to 3′) | | | | |
| AD- | Sense | gsgscua(Chd)gaAfAfAfuccaaccuaaL96 | 2380 | GGCUACGAAAAUCCAACCUAA | 2424 |
| 886883.2 | (5′ to 3′) | | | | |
| | Antisense | VPuUfaggdT(Tgn)ggauuuUfcdGuagccsgsu | 2381 | UUAGGTTGGAUUUUCGUAGCCGU | 2425 |
| | (5′ to 3′) | | | | |
| AD- | Sense | gsgscua(Chd)gaAfAfAfuccaaccuaaL96 | 2382 | GGCUACGAAAAUCCAACCUAA | 2426 |
| 886884.2 | (5′ to 3′) | | | | |
| | Antisense | VPuUfaggdT(Tgn)ggaudTuUfcdGuagccsgsu | 2383 | UUAGGTTGGAUTUUCGUAGCCGU | 2427 |
| | (5′ to 3′) | | | | |
| AD- | Sense | gsgscua(Chd)gaAfAfAfuccaaccuaaL96 | 2384 | GGCUACGAAAAUCCAACCUAA | 2428 |
| 886889.2 | (5′ to 3′) | | | | |
| | Antisense | VPuUfagdGu(Tgn)ggaudTuUfcguagccsgsu | 2385 | UUAGGUTGGAUTUUCGUAGCCGU | 2429 |
| | (5′ to 3′) | | | | |
| AD- | Sense | asasagagCfaAfAfAfcuauu(Chd)agaaL96 | 2386 | AAAGAGCAAAACUAUUCAGAA | 2430 |
| 886899.2 | (5′ to 3′) | | | | |
| | Antisense | VPusUfscugAfaUfAfguuuUfgCfucuuuscsu | 2387 | UUCUGAAUAGUUUUGCUCUUUCU | 2431 |
| | (5′ to 3′) | | | | |
| AD- | Sense | asasaga(Ghd)CfaAfAfAfcuauucagaaL96 | 2388 | AAAGAGCAAAACUAUUCAGAA | 2432 |
| 886900.2 | (5′ to 3′) | | | | |
| | Antisense | VPusUfscugAfauaguuuUfgCfucuuuscsu | 2389 | UUCUGAAUAGUUUUGCUCUUUCU | 2433 |
| | (5′ to 3′) | | | | |
| AD- | Sense | asasagag(Chd)aAfAfAfcuauucagaaL96 | 2390 | AAAGAGCAAAACUAUUCAGAA | 2434 |
| 886906.2 | (5′ to 3′) | | | | |
| | Antisense | VPuUfcugAfauaguuuUfgCfucuuuscsu | 2391 | UUCUGAAUAGUUUUGCUCUUUCU | 2435 |
| | (5′ to 3′) | | | | |
| AD- | Sense | asasagag(Chd)aAfaAfcuauucagaaL96 | 2392 | AAAGAGCAAAACUAUUCAGAA | 2436 |
| 886907.2 | (5′ to 3′) | | | | |
| | Antisense | VPuUfcugAfauagudTuUfgCfucuuuscsu | 2393 | UUCUGAAUAGUTUUGCUCUUUCU | 2437 |
| | (5′ to 3′) | | | | |
| AD- | Sense | asasagag(Chd)adAadAcuauucagaaL96 | 2394 | AAAGAGCAAAACUAUUCAGAA | 2438 |
| 886908.2 | (5′ to 3′) | | | | |
| | Antisense | VPuUfcugAfauagudTuUfgCfucuuuscsu | 2395 | UUCUGAAUAGUTUUGCUCUUUCU | 2439 |
| | (5′ to 3′) | | | | |
| AD- | Sense | asasagag(Chd)adAadAcuauucagaaL96 | 2396 | AAAGAGCAAAACUAUUCAGAA | 2440 |
| 886909.2 | (5′ to 3′) | | | | |
| | Antisense | VPuUfcugdAauagudTuUfgdCucuuuscsu | 2397 | UUCUGAAUAGUTUUGCUCUUUCU | 2441 |
| | (5′ to 3′) | | | | |
| AD- | Sense | ususuau(Ghd)AfuUfUfAfcucauuaucaL96 | 2398 | UUUAUGAUUUACUCAUUAUCA | 2442 |
| 886919.2 | (5′ to 3′) | | | | |
| | Antisense | VPusGfsauaAfugaguaaAfuCfauaaasasc | 2399 | UGAUAAUGAGUAAAUCAUAAAAC | 2443 |
| | (5′ to 3′) | | | | |
| AD- | Sense | ususuaug(Ahd)uUfudAcucauuaucaL96 | 2400 | UUUAUGAUUUACUCAUUAUCA | 2444 |
| 886928.2 | (5′ to 3′) | | | | |
| | Antisense | VPudGauadAugagudAaAfudCauaaasasc | 2401 | UGAUAAUGAGUAAAUCAUAAAAC | 2445 |
| | (5′ to 3′) | | | | |
| AD- | Sense | ususuaugAfuUfUfAfcuc(Ahd)uuaucaL96 | 2402 | UUUAUGAUUUACUCAUUAUCA | 2446 |
| 886930.2 | (5′ to 3′) | | | | |
| | Antisense | VPusdGsauaAfugaguaaAfuCfauaaasusg | 2403 | UGAUAAUGAGUAAAUCAUAAAUG | 2447 |
| | (5′ to 3′) | | | | |
| AD- | Sense | ususuaug(Ahd)uUfUfAfcucauuaucaL96 | 2404 | UUUAUGAUUUACUCAUUAUCA | 2448 |
| 886931.2 | (5′ to 3′) | | | | |
| | Antisense | VPusdGsauaAfugaguaaAfuCfauaaasusg | 2405 | UGAUAAUGAGUAAAUCAUAAAUG | 2449 |
| | (5′ to 3′) | | | | |

Table 16 key:
U = uridine-3′-phosphate,
u = 2′-O-methyluridine-3′-phosphate,
us = 2′-O-methyluridine-3′-phosphorothioate,
a = 2′-O-methyladenosine-3′-phosphate,
A = adenosine-3′-phosphate,
as = 2′-O-methyladenosine-3′-phosphorothioate,
(Ahd) = 2′-O-hexadecyl-adenosine-3′-phosphate,
Gf = 2′-fluoroguanosine-3′-phosphate,
Uf = 2′-fluorouridine-3′-phosphate,
Cf = 2′-fluorocytidine-3′-phosphate,
Af = 2′-fluoroadenosine-3′-phosphate,
cs = 2′-O-methylcytidine-3′-phosphate,
VP = Vinylphosphate 5′,
(Agn) = Adenosine-glycol nucleic acid (GNA),
gs = 2′-O-methylguanosine-3′-phosphorothioate,
(Chd) = 2′-O-hexadecyl-cytidine-3′-phosphate,
(Tgn) = Thymidine-glycol nucleic acid (GNA) S-Isomer,
(Ghd) = 2′-O-hexadecyl-guanosine-3′-phosphate,
and
cs = 2′-O-methylcytidine-3′-phosphorothioate.

TABLE 17
C16 siRNA conjugates identified to knock down APP in in vivo NHP studies

| | | | SEQ | | SEQ |
|---|---|---|---|---|---|
| | | | ID | | ID |
| Duplex | Strand | Oligonucleotide Sequence | NO: | Target Sequence | NO: |
| AD- | Sense | Q363sasaaaucCfaAfCfCfuacaaguuscsa | 2450 | CGAAAAUCCAACCUACAAGUUCU | 2460 |
| 994379 | (5′ to 3′) | | | | |
| | Antisense | VPusGfsaacu(Tgn)guagguUfgGfauuuuscsg | 2451 | AGAACUUGUAGGUUGGAUUUUCG | 2461 |
| | (5′ to 3′) | | | | |
| AD- | Sense | gsgscua(Chd)gadAadAuccaaccusasa | 2452 | ACGGCUACGAAAAUCCAACCUAC | 2462 |
| 961583 | (5′ to 3′) | | | | |
| | Antisense | VPusUfsaggu(Tgn)ggaudTuUfcdGuagccsgsu | 2453 | GUAGGUUGGAUUUUCGUAGCCGU | 2463 |
| | (5′ to 3′) | | | | |
| AD- | Sense | asasagag(Chd)aAfaAfcuauucagsasa | 2454 | AGAAAGAGCAAAACUAUUCAGAU | 2464 |
| 961584 | (5′ to 3′) | | | | |
| | Antisense | VPuUfcugAfauagudTuUfgCfucuuuscsu | 2455 | AUCUGAAUAGUUUUGCUCUUUCU | 2465 |
| | (5′ to 3′) | | | | |
| AD- | Sense | asasagag(Chd)adAadAcuauucagsasa | 2456 | AGAAAGAGCAAAACUAUUCAGAU | 2466 |
| 961585 | (5′ to 3′) | | | | |
| | Antisense | VPuUfcugdAauagudTuUfgdCucuuuscsu | 2457 | AUCUGAAUAGUUUUGCUCUUUCU | 2467 |
| | (5′ to 3′) | | | | |
| AD- | Sense | ususuau(Ghd)AfuUfUfAfcucauuauscsa | 2458 | GUUUUAUGAUUUACUCAUUAUCG | 2468 |
| 961586 | (5′ to 3′) | | | | |
| | Antisense | VPusGfsauaAfugaguaaAfuCfauaaasusg | 2459 | CGAUAAUGAGUAAAUCAUAAAAC | 2469 |
| | (5′ to 3′) | | | | |

TABLE 18
Unmodified base transcripts used in the C16 conjugates of Table 17

| | | | | SEQ |
|---|---|---|---|---|
| | | | | ID |
| Duplex | Strand | Oligo name | Transcript Sequence | NO: |
| AD- | Sense | A-1701871.1 | AAAAUCCAACCUACAAGUUCA | 2470 |
| 994379 | (5′ to 3′) | | | |
| | Antisense | A-882382.1 | UGAACUTGUAGGUUGGAUUUUCG | 2471 |
| | (5′ to 3′) | | | |
| AD- | Sense | A-1770584.1 | GGCUACGAAAAUCCAACCUAA | 2472 |
| 961583 | (5′ to 3′) | | | |
| | Antisense | A-1683088.1 | UUAGGUTGGAUTUUCGUAGCCGU | 2473 |
| | (5′ to 3′) | | | |
| AD- | Sense | A-1770585.1 | AAAGAGCAAAACUAUUCAGAA | 2474 |
| 961584 | (5′ to 3′) | | | |
| | Antisense | A-1683116.1 | UUCUGAAUAGUTUUGCUCUUUCU | 2475 |
| | (5′ to 3′) | | | |
| AD- | Sense | A-1770586.1 | AAAGAGCAAAACUAUUCAGAA | 2476 |
| 961585 | (5′ to 3′) | | | |
| | Antisense | A-1683118.1 | UUCUGAAUAGUTUUGCUCUUUCU | 2477 |
| | (5′ to 3′) | | | |
| AD- | Sense | A-1770587.1 | UUUAUGAUUUACUCAUUAUCA | 2478 |
| 961586 | (5′ to 3′) | | | |
| | Antisense | A-1683134.1 | UGAUAAUGAGUAAAUCAUAAAUG | 2479 |
| | (5′ to 3′) | | | |

TABLE 19
Exemplary Mouse APP-Targeting RNAi Duplexes, Modified Sequences

| | | SEQ | | SEQ | | SEQ |
|---|---|---|---|---|---|---|
| Duplex | | ID | | ID | | ID |
| Name | Sense Sequence (5′ to 3′) | NO | Antisense Sequence (5′ to 3′) | NO | mRNA target sequence | NO |
| AD- | csasugu(Uhd)CfuGfUfGfguaaacucaaL96 | 2480 | VPusUfsgagUfuUfAfccacAfgAfacaugsgsc | 2572 | GCCAUGUUCUGUGGUAAACUCAA | 2664 |
| 397175 | | | | | | |
| AD- | usgsuuc(Uhd)GfuGfGfUfaaacucaacaL96 | 2481 | VPusGfsuugAfgUfUfuaccAfcAfgaacasusg | 2573 | CAUGUUCUGUGGUAAACUCAACA | 2665 |
| 397176 | | | | | | |
| AD- | asusguu(Chd)UfgUfGfGfuaaacucaaaL96 | 2482 | VPusUfsugaGfuUfUfaccaCfaGfaacausgsg | 2574 | CCAUGUUCUGUGGUAAACUCAAC | 2666 |
| 397177 | | | | | | |
| AD- | csusgug(Ghd)UfaAfAfCfucaacaugcaL96 | 2483 | VPusGfscauGfuUfGfaguuUfaCfcacagsasa | 2575 | UUCUGUGGUAAACUCAACAUGCA | 2667 |
| 397178 | | | | | | |
| AD- | gsgsuaa(Ahd)CfuCfAfAfcaugcacauaL96 | 2484 | VPusAfsuguGfcAfUfguugAfgUfuuaccsasc | 2576 | GUGGUAAACUCAACAUGCACAUG | 2668 |
| 397179 | | | | | | |
| AD- | usgsugg(Uhd)AfaAfCfUfcaacaugcaaL96 | 2485 | VPusUfsgcaUfgUfUfgaguUfuAfccacasgsa | 2577 | UCUGUGGUAAACUCAACAUGCAC | 2669 |
| 397180 | | | | | | |
| AD- | gsasaga(Ghd)CfaCfUfAfacuugcacgaL96 | 2486 | VPusCfsgugCfaAfGfuuagUfgCfucuucsusc | 2578 | GAGAAGAGCACUAACUUGCACGA | 2670 |
| 397181 | | | | | | |
| AD- | cscsgcu(Ghd)GfuAfCfUfuugaugucaaL96 | 2487 | VPusUfsgacAfuCfAfaaguAfcCfagcggsgsa | 2579 | UCCCGCUGGUACUUUGAUGUCAC | 2671 |
| 397182 | | | | | | |
| AD- | cscsaug(Uhd)UfcUfGfUfgguaaacucaL96 | 2488 | VPusGfsaguUfuAfCfcacaGfaAfcauggscsg | 2580 | CGCCAUGUUCUGUGGUAAACUCA | 2672 |
| 397183 | | | | | | |
| AD- | gsusggu(Ahd)AfaCfUfCfaacaugcacaL96 | 2489 | VPusGfsugcAfuGfUfugagUfuUfaccacsasg | 2581 | CUGUGGUAAACUCAACAUGCACA | 2673 |
| 397184 | | | | | | |
| AD- | gsasacu(Ghd)CfaGfAfUfcacaaacguaL96 | 2490 | VPusAfscguUfuGfUfgaucUfgCfaguucsasg | 2582 | CUGAACUGCAGAUCACAAACGUG | 2674 |
| 397185 | | | | | | |
| AD- | asasgag(Chd)AfcUfAfAfcuugcacgaaL96 | 2491 | VPusUfscguGfcAfAfguuaGfuGfcucuuscsu | 2583 | AGAAGAGCACUAACUUGCACGAC | 2675 |
| 397186 | | | | | | |
| AD- | asgscac(Uhd)AfaCfUfUfgcacgacuaaL96 | 2492 | VPusUfsaguCfgUfGfcaagUfuAfgugcuscsu | 2584 | AGAGCACUAACUUGCACGACUAU | 2676 |
| 397187 | | | | | | |
| AD- | gscsacu(Ahd)AfcUfUfGfcacgacuauaL96 | 2493 | VPusAfsuagUfcGfUfgcaaGfuUfagugcsusc | 2585 | GAGCACUAACUUGCACGACUAUG | 2677 |
| 397188 | | | | | | |
| AD- | asasagu(Uhd)UfaCfUfCfaagacuaccaL96 | 2494 | VPusGfsguaGfuCfUfugagUfaAfacuuusgsg | 2586 | CCAAAGUUUACUCAAGACUACCA | 2678 |
| 397189 | | | | | | |
| AD- | csgscau(Ghd)AfaCfCfAfgucucugucaL96 | 2495 | VPusGfsacaGfaGfAfcuggUfuCfaugcgscsu | 2587 | AGCGCAUGAACCAGUCUCUGUCC | 2679 |
| 397190 | | | | | | |
| AD- | csascau(Chd)GfuGfAfUfuccuuaccgaL96 | 2496 | VPusCfsgguAfaGfGfaaucAfcGfaugugsgsg | 2588 | CCCACAUCGUGAUUCCUUACCGU | 2680 |
| 397191 | | | | | | |
| AD- | asusgcu(Ghd)AfaGfAfAfguacguccgaL96 | 2497 | VPusCfsggaCfgUfAfcuucUfuCfagcausgsu | 2589 | ACAUGCUGAAGAAGUACGUCCGU | 2681 |
| 397192 | | | | | | |
| AD- | gsasgcg(Chd)AfuGfAfAfccagucucuaL96 | 2498 | VPusAfsgagAfcUfGfguucAfuGfcgcucsgsu | 2590 | ACGAGCGCAUGAACCAGUCUCUG | 2682 |
| 397193 | | | | | | |
| AD- | gsasgca(Ghd)AfaCfUfAfcuccgacgaaL96 | 2499 | VPusUfscguCfgGfAfguagUfuCfugcucscsu | 2591 | AGGAGCAGAACUACUCCGACGAU | 2683 |
| 397194 | | | | | | |
| AD- | csasccc(Ahd)CfaUfCfGfugauuccuuaL96 | 2500 | VPusAfsaggAfaUfCfacgaUfgUfgggugsusg | 2592 | CACACCCACAUCGUGAUUCCUUA | 2684 |
| 397195 | | | | | | |
| AD- | asgsagc(Ahd)CfuAfAfCfuugcacgacaL96 | 2501 | VPusGfsucgUfgCfAfaguuAfgUfgcucususc | 2593 | GAAGAGCACUAACUUGCACGACU | 2685 |
| 397196 | | | | | | |
| AD- | csascua(Ahd)CfuUfGfCfacgacuaugaL96 | 2502 | VPusCfsauaGfuCfGfugcaAfgUfuagugscsu | 2594 | AGCACUAACUUGCACGACUAUGG | 2686 |
| 397197 | | | | | | |
| AD- | csuscaa(Ghd)AfcUfAfCfcagugaaccaL96 | 2503 | VPusGfsguuCfaCfUfgguaGfuCfuugagsusa | 2595 | UACUCAAGACUACCAGUGAACCU | 2687 |
| 397198 | | | | | | |
| AD- | asgscac(Ahd)CfcCfUfAfaagcauuuuaL96 | 2504 | VPusAfsaaaUfgCfUfuuagGfgUfgugcusgsu | 2596 | ACAGCACACCCUAAAGCAUUUUG | 2688 |
| 397199 | | | | | | |
| AD- | asasgga(Ghd)CfaGfAfAfcuacuccgaaL96 | 2505 | VPusUfscggAfgUfAfguucUfgCfuccuuscsu | 2597 | AGAAGGAGCAGAACUACUCCGAC | 2689 |
| 397200 | | | | | | |
| AD- | gsgsagc(Ahd)GfaAfCfUfacuccgacgaL96 | 2506 | VPusCfsgucGfgAfGfuaguUfcUfgcuccsusu | 2598 | AAGGAGCAGAACUACUCCGACGA | 2690 |
| 397201 | | | | | | |
| AD- | gsasaac(Ahd)GfuAfCfAfcauccauccaL96 | 2507 | VPusGfsgauGfgAfUfguguAfcUfguuucsusu | 2599 | AAGAAACAGUACACAUCCAUCCA | 2691 |
| 397202 | | | | | | |
| AD- | csusgaa(Chd)UfgCfAfGfaucacaaacaL96 | 2508 | VPusGfsuuuGfuGfAfucugCfaGfuucagsgsg | 2600 | CCCUGAACUGCAGAUCACAAACG | 2692 |
| 397203 | | | | | | |
| AD- | cscsaca(Uhd)CfgUfGfAfuuccuuaccaL96 | 2509 | VPusGfsguaAfgGfAfaucaCfgAfuguggsgsu | 2601 | ACCCACAUCGUGAUUCCUUACCG | 2693 |
| 397204 | | | | | | |
| AD- | gsusgcc(Chd)GfaCfAfAfgugcaaguuaL96 | 2510 | VPusAfsacuUfgCfAfcuugUfcGfggcacsgsa | 2602 | UCGUGCCCGACAAGUGCAAGUUC | 2694 |
| 397205 | | | | | | |
| AD- | gsascua(Chd)CfaGfUfGfaaccucuucaL96 | 2511 | VPusGfsaagAfgGfUfucacUfgGfuagucsusu | 2603 | AAGACUACCAGUGAACCUCUUCC | 2695 |
| 397206 | | | | | | |
| AD- | gsusccg(Chd)CfaUfCfAfaaaacugguaL96 | 2512 | VPusAfsccaGfuUfUfuugaUfgGfcggacsusu | 2604 | AAGUCCGCCAUCAAAAACUGGUG | 2696 |
| 397207 | | | | | | |
| AD- | gsgsccc(Uhd)CfgAfGfAfauuacaucaaL96 | 2513 | VPusUfsgauGfuAfAfuucuCfgAfgggccsasg | 2605 | CUGGCCCUCGAGAAUUACAUCAC | 2697 |
| 397208 | | | | | | |
| AD- | csasugc(Uhd)GfaAfGfAfaguacguccaL96 | 2514 | VPusGfsgacGfuAfCfuucuUfcAfgcaugsusu | 2606 | AACAUGCUGAAGAAGUACGUCCG | 2698 |
| 397209 | | | | | | |
| AD- | usgscug(Ahd)AfgAfAfGfuacguccguaL96 | 2515 | VPusAfscggAfcGfUfacuuCfuUfcagcasusg | 2607 | CAUGCUGAAGAAGUACGUCCGUG | 2699 |
| 397210 | | | | | | |
| AD- | uscscgc(Chd)AfuCfAfAfaaacuggugaL96 | 2516 | VPusCfsaccAfgUfUfuuugAfuGfgcggascsu | 2608 | AGUCCGCCAUCAAAAACUGGUGU | 2700 |
| 397211 | | | | | | |
| AD- | ususgca(Chd)GfaCfUfAfuggcaugcuaL96 | 2517 | VPusAfsgcaUfgCfCfauagUfcGfugcaasgsu | 2609 | ACUUGCACGACUAUGGCAUGCUG | 2701 |
| 397212 | | | | | | |
| AD- | uscscca(Ghd)GfuCfAfUfgagagaaugaL96 | 2518 | VPusCfsauuCfuCfUfcaugAfcCfugggascsa | 2610 | UGUCCCAGGUCAUGAGAGAAUGG | 2702 |
| 397213 | | | | | | |
| AD- | csusgaa(Ghd)AfaGfUfAfcguccgugcaL96 | 2519 | VPusGfscacGfgAfCfguacUfuCfuucagscsa | 2611 | UGCUGAAGAAGUACGUCCGUGCG | 2703 |
| 397214 | | | | | | |
| AD- | csgsugu(Ghd)AfuCfUfAfcgagcgcauaL96 | 2520 | VPusAfsugcGfcUfCfguagAfuCfacacgsgsa | 2612 | UCCGUGUGAUCUACGAGCGCAUG | 2704 |
| 397215 | | | | | | |
| AD- | usascug(Chd)CfaAfGfAfggucuacccaL96 | 2521 | VPusGfsgguAfgAfCfcucuUfgGfcaguascsu | 2613 | AGUACUGCCAAGAGGUCUACCCU | 2705 |
| 397216 | | | | | | |
| AD- | csasccg(Ahd)GfaGfAfGfaaugucccaaL96 | 2522 | VPusUfsgggAfcAfUfucucUfcUfcggugscsu | 2614 | AGCACCGAGAGAGAAUGUCCCAG | 2706 |
| 397217 | | | | | | |
| AD- | csasagg(Chd)CfuCfAfUfcauguguucaL96 | 2523 | VPusGfsaacAfcAfUfgaugAfgGfccuugsgsg | 2615 | CCCAAGGCCUCAUCAUGUGUUCA | 2707 |
| 397218 | | | | | | |
| AD- | gscsuga(Ahd)GfaAfGfUfacguccgugaL96 | 2524 | VPusCfsacgGfaCfGfuacuUfcUfucagcsasu | 2616 | AUGCUGAAGAAGUACGUCCGUGC | 2708 |
| 397219 | | | | | | |
| AD- | asasgca(Uhd)UfuUfGfAfacaugugcgaL96 | 2525 | VPusCfsgcaCfaUfGfuucaAfaAfugcuususa | 2617 | UAAAGCAUUUUGAACAUGUGCGC | 2709 |
| 397220 | | | | | | |
| AD- | csasccu(Chd)CfgUfGfUfgaucuacgaaL96 | 2526 | VPusUfscguAfgAfUfcacaCfgGfaggugsusg | 2618 | CACACCUCCGUGUGAUCUACGAG | 2710 |
| 397221 | | | | | | |
| AD- | gsasagg(Ahd)GfcAfGfAfacuacuccgaL96 | 2527 | VPusCfsggaGfuAfGfuucuGfcUfccuucsusg | 2619 | CAGAAGGAGCAGAACUACUCCGA | 2711 |
| 397222 | | | | | | |
| AD- | gsasaga(Ahd)AfcAfGfUfacacauccaaL96 | 2528 | VPusUfsggaUfgUfGfuacuGfuUfucuucsusu | 2620 | AAGAAGAAACAGUACACAUCCAU | 2712 |
| 397223 | | | | | | |
| AD- | gsusacu(Ghd)CfcAfAfGfaggucuaccaL96 | 2529 | VPusGfsguaGfaCfCfucuuGfgCfaguacsusg | 2621 | CAGUACUGCCAAGAGGUCUACCC | 2713 |
| 397224 | | | | | | |
| AD- | ascsugc(Chd)AfaGfAfGfgucuacccuaL96 | 2530 | VPusAfsgggUfaGfAfccucUfuGfgcagusasc | 2622 | GUACUGCCAAGAGGUCUACCCUG | 2714 |
| 397225 | | | | | | |
| AD- | ascsuaa(Chd)UfuGfCfAfcgacuauggaL96 | 2531 | VPusCfscauAfgUfCfgugcAfaGfuuagusgsc | 2623 | GCACUAACUUGCACGACUAUGGC | 2715 |
| 397226 | | | | | | |
| AD- | gsusccc(Ahd)UfuCfUfUfuuacggcggaL96 | 2532 | VPusCfscgcCfgUfAfaaagAfaUfgggacsasc | 2624 | GUGUCCCAUUCUUUUACGGCGGA | 2716 |
| 397227 | | | | | | |
| AD- | asasgcu(Ghd)AfcAfAfGfaaggccguuaL96 | 2533 | VPusAfsacgGfcCfUfucuuGfuCfagcuususg | 2625 | CAAAGCUGACAAGAAGGCCGUUA | 2717 |
| 397228 | | | | | | |
| AD- | usgsaca(Ahd)GfaAfGfGfccguuauccaL96 | 2534 | VPusGfsgauAfaCfGfgccuUfcUfugucasgsc | 2626 | GCUGACAAGAAGGCCGUUAUCCA | 2718 |
| 397229 | | | | | | |
| AD- | asgscau(Uhd)UfuGfAfAfcaugugcgcaL96 | 2535 | VPusGfscgcAfcAfUfguucAfaAfaugcususu | 2627 | AAAGCAUUUUGAACAUGUGCGCA | 2719 |
| 397230 | | | | | | |
| AD- | usgsuga(Uhd)CfuAfCfGfagcgcaugaaL96 | 2536 | VPusUfscauGfcGfCfucguAfgAfucacascsg | 2628 | CGUGUGAUCUACGAGCGCAUGAA | 2720 |
| 397231 | | | | | | |
| AD- | csasgcg(Ahd)GfaAfGfAfgcacuaacuaL96 | 2537 | VPusAfsguuAfgUfGfcucuUfcUfcgcugscsa | 2629 | UGCAGCGAGAAGAGCACUAACUU | 2721 |
| 397233 | | | | | | |
| AD- | asgscgu(Ghd)UfcAfAfCfccaaaguuuaL96 | 2538 | VPusAfsaacUfuUfGfgguuGfaCfacgcusgsc | 2630 | GCAGCGUGUCAACCCAAAGUUUA | 2722 |
| 397234 | | | | | | |
| AD- | usgsuca(Ahd)CfcCfAfAfaguuuacucaL96 | 2539 | VPusGfsaguAfaAfCfuuugGfgUfugacascsg | 2631 | CGUGUCAACCCAAAGUUUACUCA | 2723 |
| 397235 | | | | | | |
| AD- | usgsucc(Chd)AfuUfCfUfuuuacggcgaL96 | 2540 | VPusCfsgccGfuAfAfaagaAfuGfggacascsa | 2632 | UGUGUCCCAUUCUUUUACGGCGG | 2724 |
| 397236 | | | | | | |
| AD- | gsusguc(Ahd)AfcCfCfAfaaguuuacuaL96 | 2541 | VPusAfsguaAfaCfUfuuggGfuUfgacacsgsc | 2633 | GCGUGUCAACCCAAAGUUUACUC | 2725 |
| 397237 | | | | | | |
| AD- | asasgau(Chd)CfuGfAfUfaaacuucccaL96 | 2542 | VPusGfsggaAfgUfUfuaucAfgGfaucuusgsg | 2634 | CCAAGAUCCUGAUAAACUUCCCA | 2726 |
| 397238 | | | | | | |
| AD- | asgsauc(Chd)UfgAfUfAfaacuucccaaL96 | 2543 | VPusUfsgggAfaGfUfuuauCfaGfgaucususg | 2635 | CAAGAUCCUGAUAAACUUCCCAC | 2727 |
| 397239 | | | | | | |
| AD- | csusuac(Chd)GfuUfGfCfcuaguugguaL96 | 2544 | VPusAfsccaAfcUfAfggcaAfcGfguaagsgsa | 2636 | UCCUUACCGUUGCCUAGUUGGUG | 2728 |
| 397240 | | | | | | |
| AD- | gsusgug(Uhd)CfcCfAfUfucuuuuacgaL96 | 2545 | VPusCfsguaAfaAfGfaaugGfgAfcacacsusu | 2637 | AAGUGUGUCCCAUUCUUUUACGG | 2729 |
| 397241 | | | | | | |
| AD- | gsusguc(Chd)CfaUfUfCfuuuuacggcaL96 | 2546 | VPusGfsccgUfaAfAfagaaUfgGfgacacsasc | 2638 | GUGUGUCCCAUUCUUUUACGGCG | 2730 |
| 397242 | | | | | | |
| AD- | csasuag(Chd)AfaCfCfGfugauugucaaL96 | 2547 | VPusUfsgacAfaUfCfacggUfuGfcuaugsasc | 2639 | GUCAUAGCAACCGUGAUUGUCAU | 2731 |
| 397243 | | | | | | |
| AD- | gsasacg(Ghd)AfuAfUfGfagaauccaaaL96 | 2548 | VPusUfsuggAfuUfCfucauAfuCfcguucsusg | 2640 | CAGAACGGAUAUGAGAAUCCAAC | 2732 |
| 397244 | | | | | | |
| AD- | usgsugu(Chd)CfcAfUfUfcuuuuacggaL96 | 2549 | VPusCfscguAfaAfAfgaauGfgGfacacascsu | 2641 | AGUGUGUCCCAUUCUUUUACGGC | 2733 |
| 397245 | | | | | | |
| AD- | gscsaac(Chd)GfuGfAfUfugucaucacaL96 | 2550 | VPusGfsugaUfgAfCfaaucAfcGfguugcsusa | 2642 | UAGCAACCGUGAUUGUCAUCACC | 2734 |
| 397246 | | | | | | |
| AD- | gscsagc(Ghd)AfgAfAfGfagcacuaacaL96 | 2551 | VPusGfsuuaGfuGfCfucuuCfuCfgcugcsasu | 2643 | AUGCAGCGAGAAGAGCACUAACU | 2735 |
| 397247 | | | | | | |
| AD- | csasgaa(Uhd)UfcGfGfAfcaugauucaaL96 | 2552 | VPusUfsgaaUfcAfUfguccGfaAfuucugscsa | 2644 | UGCAGAAUUCGGACAUGAUUCAG | 2736 |
| 397248 | | | | | | |
| AD- | uscscug(Ahd)UfaAfAfCfuucccacgaaL96 | 2553 | VPusUfscguGfgGfAfaguuUfaUfcaggasusc | 2645 | GAUCCUGAUAAACUUCCCACGAC | 2737 |
| 397249 | | | | | | |
| AD- | asgsaac(Ghd)GfaUfAfUfgagaauccaaL96 | 2554 | VPusUfsggaUfuCfUfcauaUfcCfguucusgsc | 2646 | GCAGAACGGAUAUGAGAAUCCAA | 2738 |
| 397250 | | | | | | |
| AD- | cscsuua(Chd)CfgUfUfGfccuaguuggaL96 | 2555 | VPusCfscaaCfuAfGfgcaaCfgGfuaaggsasa | 2647 | UUCCUUACCGUUGCCUAGUUGGU | 2739 |
| 397251 | | | | | | |
| AD- | asusccu(Ghd)AfuAfAfAfcuucccacgaL96 | 2556 | VPusCfsgugGfgAfAfguuuAfuCfaggauscsu | 2648 | AGAUCCUGAUAAACUUCCCACGA | 2740 |
| 397252 | | | | | | |
| AD- | cscsuga(Uhd)AfaAfCfUfucccacgacaL96 | 2557 | VPusGfsucgUfgGfGfaaguUfuAfucaggsasu | 2649 | AUCCUGAUAAACUUCCCACGACA | 2741 |
| 397253 | | | | | | |
| AD- | csgsgau(Ghd)GfaUfGfUfuugugagacaL96 | 2558 | VPusGfsucuCfaCfAfaacaUfcCfauccgscsu | 2650 | AGCGGAUGGAUGUUUGUGAGACC | 2742 |
| 397254 | | | | | | |
| AD- | gsascac(Ghd)GfaAfGfAfguacugcauaL96 | 2559 | VPusAfsugcAfgUfAfcucuUfcCfgugucsasa | 2651 | UUGACACGGAAGAGUACUGCAUG | 2743 |
| 397255 | | | | | | |
| AD- | gscsagc(Ahd)GfaAfCfGfgauaugagaaL96 | 2560 | VPusUfscucAfuAfUfccguUfcUfgcugcsasu | 2652 | AUGCAGCAGAACGGAUAUGAGAA | 2744 |
| 397256 | | | | | | |
| AD- | gscsaga(Ahd)CfgGfAfUfaugagaaucaL96 | 2561 | VPusGfsauuCfuCfAfuaucCfgUfucugcsusg | 2653 | CAGCAGAACGGAUAUGAGAAUCC | 2745 |
| 397257 | | | | | | |
| AD- | csasgaa(Chd)GfgAfUfAfugagaauccaL96 | 2562 | VPusGfsgauUfcUfCfauauCfcGfuucugscsu | 2654 | AGCAGAACGGAUAUGAGAAUCCA | 2746 |
| 397258 | | | | | | |
| AD- | ascscgu(Chd)GfcCfAfAfagagacaugaL96 | 2563 | VPusCfsaugUfcUfCfuuugGfcGfacggusgsu | 2655 | ACACCGUCGCCAAAGAGACAUGC | 2747 |
| 397259 | | | | | | |
| AD- | gsusucu(Ghd)UfgGfUfAfaacucaacaaL96 | 2564 | VPusUfsguuGfaGfUfuuacCfaCfagaacsasu | 2656 | AUGUUCUGUGGUAAACUCAACAU | 2748 |
| 397260 | | | | | | |
| AD- | gsgsuac(Uhd)UfuGfAfUfgucacugaaaL96 | 2565 | VPusUfsucaGfuGfAfcaucAfaAfguaccsasg | 2657 | CUGGUACUUUGAUGUCACUGAAG | 2749 |
| 397261 | | | | | | |
| AD- | cscscaa(Ahd)GfuUfUfAfcucaagacuaL96 | 2566 | VPusAfsgucUfuGfAfguaaAfcUfuugggsusu | 2658 | AACCCAAAGUUUACUCAAGACUA | 2750 |
| 397262 | | | | | | |
| AD- | cscsaaa(Ghd)UfuUfAfCfucaagacuaaL96 | 2567 | VPusUfsaguCfuUfGfaguaAfaCfuuuggsgsu | 2659 | ACCCAAAGUUUACUCAAGACUAC | 2751 |
| 397263 | | | | | | |
| AD- | csasuca(Uhd)GfuGfUfUfcaacaugcuaL96 | 2568 | VPusAfsgcaUfgUfUfgaacAfcAfugaugsasg | 2660 | CUCAUCAUGUGUUCAACAUGCUG | 2752 |
| 397264 | | | | | | |
| AD- | asascau(Ghd)CfuGfAfAfgaaguacguaL96 | 2569 | VPusAfscguAfcUfUfcuucAfgCfauguusgsa | 2661 | UCAACAUGCUGAAGAAGUACGUC | 2753 |
| 397265 | | | | | | |
| AD- | ususcug(Uhd)GfgUfAfAfacucaacauaL96 | 2570 | VPusAfsuguUfgAfGfuuuaCfcAfcagaascsa | 2662 | UGUUCUGUGGUAAACUCAACAUG | 2754 |
| 397266 | | | | | | |
| AD- | uscsugu(Ghd)GfuAfAfAfcucaacaugaL96 | 2571 | VPusCfsaugUfuGfAfguuuAfcCfacagasasc | 2663 | GUUCUGUGGUAAACUCAACAUGC | 2755 |
| 397267 | | | | | | |

TABLE 20
Mouse APP Modified Sequences, No “L96” Linker, No Vinyl-Phosphate

| | | SEQ | | SEQ | | SEQ |
|---|---|---|---|---|---|---|
| Duplex | | ID | | ID | | ID |
| Name | Sense Sequence (5′ to 3′) | NO | Antisense Sequence (5′ to 3′) | NO | mRNA target sequence | NO |
| AD- | csasugu(Uhd)CfuGfUfGfguaaacucaa | 2480 | usUfsgagUfuUfAfccacAfgAfacaugsgsc | 2572 | GCCAUGUUCUGUGGUAAACUCAA | 2664 |
| 397175 | | | | | | |
| AD- | usgsuuc(Uhd)GfuGfGfUfaaacucaaca | 2481 | usGfsuugAfgUfUfuaccAfcAfgaacasusg | 2573 | CAUGUUCUGUGGUAAACUCAACA | 2665 |
| 397176 | | | | | | |
| AD- | asusguu(Chd)UfgUfGfGfuaaacucaaa | 2482 | usUfsugaGfuUfUfaccaCfaGfaacausgsg | 2574 | CCAUGUUCUGUGGUAAACUCAAC | 2666 |
| 397177 | | | | | | |
| AD- | csusgug(Ghd)UfaAfAfCfucaacaugca | 2483 | usGfscauGfuUfGfaguuUfaCfcacagsasa | 2575 | UUCUGUGGUAAACUCAACAUGCA | 2667 |
| 397178 | | | | | | |
| AD- | gsgsuaa(Ahd)CfuCfAfAfcaugcacaua | 2484 | usAfsuguGfcAfUfguugAfgUfuuaccsasc | 2576 | GUGGUAAACUCAACAUGCACAUG | 2668 |
| 397179 | | | | | | |
| AD- | usgsugg(Uhd)AfaAfCfUfcaacaugcaa | 2485 | usUfsgcaUfgUfUfgaguUfuAfccacasgsa | 2577 | UCUGUGGUAAACUCAACAUGCAC | 2669 |
| 397180 | | | | | | |
| AD- | gsasaga(Ghd)CfaCfUfAfacuugcacga | 2486 | usCfsgugCfaAfGfuuagUfgCfucuucsusc | 2578 | GAGAAGAGCACUAACUUGCACGA | 2670 |
| 397181 | | | | | | |
| AD- | cscsgcu(Ghd)GfuAfCfUfuugaugucaa | 2487 | usUfsgacAfuCfAfaaguAfcCfagcggsgsa | 2579 | UCCCGCUGGUACUUUGAUGUCAC | 2671 |
| 397182 | | | | | | |
| AD- | cscsaug(Uhd)UfcUfGfUfgguaaacuca | 2488 | usGfsaguUfuAfCfcacaGfaAfcauggscsg | 2580 | CGCCAUGUUCUGUGGUAAACUCA | 2672 |
| 397183 | | | | | | |
| AD- | gsusggu(Ahd)AfaCfUfCfaacaugcaca | 2489 | usGfsugcAfuGfUfugagUfuUfaccacsasg | 2581 | CUGUGGUAAACUCAACAUGCACA | 2673 |
| 397184 | | | | | | |
| AD- | gsasacu(Ghd)CfaGfAfUfcacaaacgua | 2490 | usAfscguUfuGfUfgaucUfgCfaguucsasg | 2582 | CUGAACUGCAGAUCACAAACGUG | 2674 |
| 397185 | | | | | | |
| AD- | asasgag(Chd)AfcUfAfAfcuugcacgaa | 2491 | usUfscguGfcAfAfguuaGfuGfcucuuscsu | 2583 | AGAAGAGCACUAACUUGCACGAC | 2675 |
| 397186 | | | | | | |
| AD- | asgscac(Uhd)AfaCfUfUfgcacgacuaa | 2492 | usUfsaguCfgUfGfcaagUfuAfgugcuscsu | 2584 | AGAGCACUAACUUGCACGACUAU | 2676 |
| 397187 | | | | | | |
| AD- | gscsacu(Ahd)AfcUfUfGfcacgacuaua | 2493 | usAfsuagUfcGfUfgcaaGfuUfagugcsusc | 2585 | GAGCACUAACUUGCACGACUAUG | 2677 |
| 397188 | | | | | | |
| AD- | asasagu(Uhd)UfaCfUfCfaagacuacca | 2494 | usGfsguaGfuCfUfugagUfaAfacuuusgsg | 2586 | CCAAAGUUUACUCAAGACUACCA | 2678 |
| 397189 | | | | | | |
| AD- | csgscau(Ghd)AfaCfCfAfgucucuguca | 2495 | usGfsacaGfaGfAfcuggUfuCfaugcgscsu | 2587 | AGCGCAUGAACCAGUCUCUGUCC | 2679 |
| 397190 | | | | | | |
| AD- | csascau(Chd)GfuGfAfUfuccuuaccga | 2496 | usCfsgguAfaGfGfaaucAfcGfaugugsgsg | 2588 | CCCACAUCGUGAUUCCUUACCGU | 2680 |
| 397191 | | | | | | |
| AD- | asusgcu(Ghd)AfaGfAfAfguacguccga | 2497 | usCfsggaCfgUfAfcuucUfuCfagcausgsu | 2589 | ACAUGCUGAAGAAGUACGUCCGU | 2681 |
| 397192 | | | | | | |
| AD- | gsasgcg(Chd)AfuGfAfAfccagucucua | 2498 | usAfsgagAfcUfGfguucAfuGfcgcucsgsu | 2590 | ACGAGCGCAUGAACCAGUCUCUG | 2682 |
| 397193 | | | | | | |
| AD- | gsasgca(Ghd)AfaCfUfAfcuccgacgaa | 2499 | usUfscguCfgGfAfguagUfuCfugcucscsu | 2591 | AGGAGCAGAACUACUCCGACGAU | 2683 |
| 397194 | | | | | | |
| AD- | csasccc(Ahd)CfaUfCfGfugauuccuua | 2500 | usAfsaggAfaUfCfacgaUfgUfgggugsusg | 2592 | CACACCCACAUCGUGAUUCCUUA | 2684 |
| 397195 | | | | | | |
| AD- | asgsagc(Ahd)CfuAfAfCfuugcacgaca | 2501 | usGfsucgUfgCfAfaguuAfgUfgcucususc | 2593 | GAAGAGCACUAACUUGCACGACU | 2685 |
| 397196 | | | | | | |
| AD- | csascua(Ahd)CfuUfGfCfacgacuauga | 2502 | usCfsauaGfuCfGfugcaAfgUfuagugscsu | 2594 | AGCACUAACUUGCACGACUAUGG | 2686 |
| 397197 | | | | | | |
| AD- | csuscaa(Ghd)AfcUfAfCfcagugaacca | 2503 | usGfsguuCfaCfUfgguaGfuCfuugagsusa | 2595 | UACUCAAGACUACCAGUGAACCU | 2687 |
| 397198 | | | | | | |
| AD- | asgscac(Ahd)CfcCfUfAfaagcauuuua | 2504 | usAfsaaaUfgCfUfuuagGfgUfgugcusgsu | 2596 | ACAGCACACCCUAAAGCAUUUUG | 2688 |
| 397199 | | | | | | |
| AD- | asasgga(Ghd)CfaGfAfAfcuacuccgaa | 2505 | usUfscggAfgUfAfguucUfgCfuccuuscsu | 2597 | AGAAGGAGCAGAACUACUCCGAC | 2689 |
| 397200 | | | | | | |
| AD- | gsgsagc(Ahd)GfaAfCfUfacuccgacga | 2506 | usCfsgucGfgAfGfuaguUfcUfgcuccsusu | 2598 | AAGGAGCAGAACUACUCCGACGA | 2690 |
| 397201 | | | | | | |
| AD- | gsasaac(Ahd)GfuAfCfAfcauccaucca | 2507 | usGfsgauGfgAfUfguguAfcUfguuucsusu | 2599 | AAGAAACAGUACACAUCCAUCCA | 2691 |
| 397202 | | | | | | |
| AD- | csusgaa(Chd)UfgCfAfGfaucacaaaca | 2508 | usGfsuuuGfuGfAfucugCfaGfuucagsgsg | 2600 | CCCUGAACUGCAGAUCACAAACG | 2692 |
| 397203 | | | | | | |
| AD- | cscsaca(Uhd)CfgUfGfAfuuccuuacca | 2509 | usGfsguaAfgGfAfaucaCfgAfuguggsgsu | 2601 | ACCCACAUCGUGAUUCCUUACCG | 2693 |
| 397204 | | | | | | |
| AD- | gsusgcc(Chd)GfaCfAfAfgugcaaguua | 2510 | usAfsacuUfgCfAfcuugUfcGfggcacsgsa | 2602 | UCGUGCCCGACAAGUGCAAGUUC | 2694 |
| 397205 | | | | | | |
| AD- | gsascua(Chd)CfaGfUfGfaaccucuuca | 2511 | usGfsaagAfgGfUfucacUfgGfuagucsusu | 2603 | AAGACUACCAGUGAACCUCUUCC | 2695 |
| 397206 | | | | | | |
| AD- | gsusccg(Chd)CfaUfCfAfaaaacuggua | 2512 | usAfsccaGfuUfUfuugaUfgGfcggacsusu | 2604 | AAGUCCGCCAUCAAAAACUGGUG | 2696 |
| 397207 | | | | | | |
| AD- | gsgsccc(Uhd)CfgAfGfAfauuacaucaa | 2513 | usUfsgauGfuAfAfuucuCfgAfgggccsasg | 2605 | CUGGCCCUCGAGAAUUACAUCAC | 2697 |
| 397208 | | | | | | |
| AD- | csasugc(Uhd)GfaAfGfAfaguacgucca | 2514 | usGfsgacGfuAfCfuucuUfcAfgcaugsusu | 2606 | AACAUGCUGAAGAAGUACGUCCG | 2698 |
| 397209 | | | | | | |
| AD- | usgscug(Ahd)AfgAfAfGfuacguccgua | 2515 | usAfscggAfcGfUfacuuCfuUfcagcasusg | 2607 | CAUGCUGAAGAAGUACGUCCGUG | 2699 |
| 397210 | | | | | | |
| AD- | uscscgc(Chd)AfuCfAfAfaaacugguga | 2516 | usCfsaccAfgUfUfuuugAfuGfgcggascsu | 2608 | AGUCCGCCAUCAAAAACUGGUGU | 2700 |
| 397211 | | | | | | |
| AD- | ususgca(Chd)GfaCfUfAfuggcaugcua | 2517 | usAfsgcaUfgCfCfauagUfcGfugcaasgsu | 2609 | ACUUGCACGACUAUGGCAUGCUG | 2701 |
| 397212 | | | | | | |
| AD- | uscscca(Ghd)GfuCfAfUfgagagaauga | 2518 | usCfsauuCfuCfUfcaugAfcCfugggascsa | 2610 | UGUCCCAGGUCAUGAGAGAAUGG | 2702 |
| 397213 | | | | | | |
| AD- | csusgaa(Ghd)AfaGfUfAfcguccgugca | 2519 | usGfscacGfgAfCfguacUfuCfuucagscsa | 2611 | UGCUGAAGAAGUACGUCCGUGCG | 2703 |
| 397214 | | | | | | |
| AD- | csgsugu(Ghd)AfuCfUfAfcgagcgcaua | 2520 | usAfsugcGfcUfCfguagAfuCfacacgsgsa | 2612 | UCCGUGUGAUCUACGAGCGCAUG | 2704 |
| 397215 | | | | | | |
| AD- | usascug(Chd)CfaAfGfAfggucuaccca | 2521 | usGfsgguAfgAfCfcucuUfgGfcaguascsu | 2613 | AGUACUGCCAAGAGGUCUACCCU | 2705 |
| 397216 | | | | | | |
| AD- | csasccg(Ahd)GfaGfAfGfaaugucccaa | 2522 | usUfsgggAfcAfUfucucUfcUfcggugscsu | 2614 | AGCACCGAGAGAGAAUGUCCCAG | 2706 |
| 397217 | | | | | | |
| AD- | csasagg(Chd)CfuCfAfUfcauguguuca | 2523 | usGfsaacAfcAfUfgaugAfgGfccuugsgsg | 2615 | CCCAAGGCCUCAUCAUGUGUUCA | 2707 |
| 397218 | | | | | | |
| AD- | gscsuga(Ahd)GfaAfGfUfacguccguga | 2524 | usCfsacgGfaCfGfuacuUfcUfucagcsasu | 2616 | AUGCUGAAGAAGUACGUCCGUGC | 2708 |
| 397219 | | | | | | |
| AD- | asasgca(Uhd)UfuUfGfAfacaugugcga | 2525 | usCfsgcaCfaUfGfuucaAfaAfugcuususa | 2617 | UAAAGCAUUUUGAACAUGUGCGC | 2709 |
| 397220 | | | | | | |
| AD- | csasccu(Chd)CfgUfGfUfgaucuacgaa | 2526 | usUfscguAfgAfUfcacaCfgGfaggugsusg | 2618 | CACACCUCCGUGUGAUCUACGAG | 2710 |
| 397221 | | | | | | |
| AD- | gsasagg(Ahd)GfcAfGfAfacuacuccga | 2527 | usCfsggaGfuAfGfuucuGfcUfccuucsusg | 2619 | CAGAAGGAGCAGAACUACUCCGA | 2711 |
| 397222 | | | | | | |
| AD- | gsasaga(Ahd)AfcAfGfUfacacauccaa | 2528 | usUfsggaUfgUfGfuacuGfuUfucuucsusu | 2620 | AAGAAGAAACAGUACACAUCCAU | 2712 |
| 397223 | | | | | | |
| AD- | gsusacu(Ghd)CfcAfAfGfaggucuacca | 2529 | usGfsguaGfaCfCfucuuGfgCfaguacsusg | 2621 | CAGUACUGCCAAGAGGUCUACCC | 2713 |
| 397224 | | | | | | |
| AD- | ascsugc(Chd)AfaGfAfGfgucuacccua | 2530 | usAfsgggUfaGfAfccucUfuGfgcagusasc | 2622 | GUACUGCCAAGAGGUCUACCCUG | 2714 |
| 397225 | | | | | | |
| AD- | ascsuaa(Chd)UfuGfCfAfcgacuaugga | 2531 | usCfscauAfgUfCfgugcAfaGfuuagusgsc | 2623 | GCACUAACUUGCACGACUAUGGC | 2715 |
| 397226 | | | | | | |
| AD- | gsusccc(Ahd)UfuCfUfUfuuacggcgga | 2532 | usCfscgcCfgUfAfaaagAfaUfgggacsasc | 2624 | GUGUCCCAUUCUUUUACGGCGGA | 2716 |
| 397227 | | | | | | |
| AD- | asasgcu(Ghd)AfcAfAfGfaaggccguua | 2533 | usAfsacgGfcCfUfucuuGfuCfagcuususg | 2625 | CAAAGCUGACAAGAAGGCCGUUA | 2717 |
| 397228 | | | | | | |
| AD- | usgsaca(Ahd)GfaAfGfGfccguuaucca | 2534 | usGfsgauAfaCfGfgccuUfcUfugucasgsc | 2626 | GCUGACAAGAAGGCCGUUAUCCA | 2718 |
| 397229 | | | | | | |
| AD- | asgscau(Uhd)UfuGfAfAfcaugugcgca | 2535 | usGfscgcAfcAfUfguucAfaAfaugcususu | 2627 | AAAGCAUUUUGAACAUGUGCGCA | 2719 |
| 397230 | | | | | | |
| AD- | usgsuga(Uhd)CfuAfCfGfagcgcaugaa | 2536 | usUfscauGfcGfCfucguAfgAfucacascsg | 2628 | CGUGUGAUCUACGAGCGCAUGAA | 2720 |
| 397231 | | | | | | |
| AD- | csasgcg(Ahd)GfaAfGfAfgcacuaacua | 2537 | usAfsguuAfgUfGfcucuUfcUfcgcugscsa | 2629 | UGCAGCGAGAAGAGCACUAACUU | 2721 |
| 397233 | | | | | | |
| AD- | asgscgu(Ghd)UfcAfAfCfccaaaguuua | 2538 | usAfsaacUfuUfGfgguuGfaCfacgcusgsc | 2630 | GCAGCGUGUCAACCCAAAGUUUA | 2722 |
| 397234 | | | | | | |
| AD- | usgsuca(Ahd)CfcCfAfAfaguuuacuca | 2539 | usGfsaguAfaAfCfuuugGfgUfugacascsg | 2631 | CGUGUCAACCCAAAGUUUACUCA | 2723 |
| 397235 | | | | | | |
| AD- | usgsucc(Chd)AfuUfCfUfuuuacggcga | 2540 | usCfsgccGfuAfAfaagaAfuGfggacascsa | 2632 | UGUGUCCCAUUCUUUUACGGCGG | 2724 |
| 397236 | | | | | | |
| AD- | gsusguc(Ahd)AfcCfCfAfaaguuuacua | 2541 | usAfsguaAfaCfUfuuggGfuUfgacacsgsc | 2633 | GCGUGUCAACCCAAAGUUUACUC | 2725 |
| 397237 | | | | | | |
| AD- | asasgau(Chd)CfuGfAfUfaaacuuccca | 2542 | usGfsggaAfgUfUfuaucAfgGfaucuusgsg | 2634 | CCAAGAUCCUGAUAAACUUCCCA | 2726 |
| 397238 | | | | | | |
| AD- | asgsauc(Chd)UfgAfUfAfaacuucccaa | 2543 | usUfsgggAfaGfUfuuauCfaGfgaucususg | 2635 | CAAGAUCCUGAUAAACUUCCCAC | 2727 |
| 397239 | | | | | | |
| AD- | csusuac(Chd)GfuUfGfCfcuaguuggua | 2544 | usAfsccaAfcUfAfggcaAfcGfguaagsgsa | 2636 | UCCUUACCGUUGCCUAGUUGGUG | 2728 |
| 397240 | | | | | | |
| AD- | gsusgug(Uhd)CfcCfAfUfucuuuuacga | 2545 | usCfsguaAfaAfGfaaugGfgAfcacacsusu | 2637 | AAGUGUGUCCCAUUCUUUUACGG | 2729 |
| 397241 | | | | | | |
| AD- | gsusguc(Chd)CfaUfUfCfuuuuacggca | 2546 | usGfsccgUfaAfAfagaaUfgGfgacacsasc | 2638 | GUGUGUCCCAUUCUUUUACGGCG | 2730 |
| 397242 | | | | | | |
| AD- | csasuag(Chd)AfaCfCfGfugauugucaa | 2547 | usUfsgacAfaUfCfacggUfuGfcuaugsasc | 2639 | GUCAUAGCAACCGUGAUUGUCAU | 2731 |
| 397243 | | | | | | |
| AD- | gsasacg(Ghd)AfuAfUfGfagaauccaaa | 2548 | usUfsuggAfuUfCfucauAfuCfcguucsusg | 2640 | CAGAACGGAUAUGAGAAUCCAAC | 2732 |
| 397244 | | | | | | |
| AD- | usgsugu(Chd)CfcAfUfUfcuuuuacgga | 2549 | usCfscguAfaAfAfgaauGfgGfacacascsu | 2641 | AGUGUGUCCCAUUCUUUUACGGC | 2733 |
| 397245 | | | | | | |
| AD- | gscsaac(Chd)GfuGfAfUfugucaucaca | 2550 | usGfsugaUfgAfCfaaucAfcGfguugcsusa | 2642 | UAGCAACCGUGAUUGUCAUCACC | 2734 |
| 397246 | | | | | | |
| AD- | gscsagc(Ghd)AfgAfAfGfagcacuaaca | 2551 | usGfsuuaGfuGfCfucuuCfuCfgcugcsasu | 2643 | AUGCAGCGAGAAGAGCACUAACU | 2735 |
| 397247 | | | | | | |
| AD- | csasgaa(Uhd)UfcGfGfAfcaugauucaa | 2552 | usUfsgaaUfcAfUfguccGfaAfuucugscsa | 2644 | UGCAGAAUUCGGACAUGAUUCAG | 2736 |
| 397248 | | | | | | |
| AD- | uscscug(Ahd)UfaAfAfCfuucccacgaa | 2553 | usUfscguGfgGfAfaguuUfaUfcaggasusc | 2645 | GAUCCUGAUAAACUUCCCACGAC | 2737 |
| 397249 | | | | | | |
| AD- | asgsaac(Ghd)GfaUfAfUfgagaauccaa | 2554 | usUfsggaUfuCfUfcauaUfcCfguucusgsc | 2646 | GCAGAACGGAUAUGAGAAUCCAA | 2738 |
| 397250 | | | | | | |
| AD- | cscsuua(Chd)CfgUfUfGfccuaguugga | 2555 | usCfscaaCfuAfGfgcaaCfgGfuaaggsasa | 2647 | UUCCUUACCGUUGCCUAGUUGGU | 2739 |
| 397251 | | | | | | |
| AD- | asusccu(Ghd)AfuAfAfAfcuucccacga | 2556 | usCfsgugGfgAfAfguuuAfuCfaggauscsu | 2648 | AGAUCCUGAUAAACUUCCCACGA | 2740 |
| 397252 | | | | | | |
| AD- | cscsuga(Uhd)AfaAfCfUfucccacgaca | 2557 | usGfsucgUfgGfGfaaguUfuAfucaggsasu | 2649 | AUCCUGAUAAACUUCCCACGACA | 2741 |
| 397253 | | | | | | |
| AD- | csgsgau(Ghd)GfaUfGfUfuugugagaca | 2558 | usGfsucuCfaCfAfaacaUfcCfauccgscsu | 2650 | AGCGGAUGGAUGUUUGUGAGACC | 2742 |
| 397254 | | | | | | |
| AD- | gsascac(Ghd)GfaAfGfAfguacugcaua | 2559 | usAfsugcAfgUfAfcucuUfcCfgugucsasa | 2651 | UUGACACGGAAGAGUACUGCAUG | 2743 |
| 397255 | | | | | | |
| AD- | gscsagc(Ahd)GfaAfCfGfgauaugagaa | 2560 | usUfscucAfuAfUfccguUfcUfgcugcsasu | 2652 | AUGCAGCAGAACGGAUAUGAGAA | 2744 |
| 397256 | | | | | | |
| AD- | gscsaga(Ahd)CfgGfAfUfaugagaauca | 2561 | usGfsauuCfuCfAfuaucCfgUfucugcsusg | 2653 | CAGCAGAACGGAUAUGAGAAUCC | 2745 |
| 397257 | | | | | | |
| AD- | csasgaa(Chd)GfgAfUfAfugagaaucca | 2562 | usGfsgauUfcUfCfauauCfcGfuucugscsu | 2654 | AGCAGAACGGAUAUGAGAAUCCA | 2746 |
| 397258 | | | | | | |
| AD- | ascscgu(Chd)GfcCfAfAfagagacauga | 2563 | usCfsaugUfcUfCfuuugGfcGfacggusgsu | 2655 | ACACCGUCGCCAAAGAGACAUGC | 2747 |
| 397259 | | | | | | |
| AD- | gsusucu(Ghd)UfgGfUfAfaacucaacaa | 2564 | usUfsguuGfaGfUfuuacCfaCfagaacsasu | 2656 | AUGUUCUGUGGUAAACUCAACAU | 2748 |
| 397260 | | | | | | |
| AD- | gsgsuac(Uhd)UfuGfAfUfgucacugaaa | 2565 | usUfsucaGfuGfAfcaucAfaAfguaccsasg | 2657 | CUGGUACUUUGAUGUCACUGAAG | 2749 |
| 397261 | | | | | | |
| AD- | cscscaa(Ahd)GfuUfUfAfcucaagacua | 2566 | usAfsgucUfuGfAfguaaAfcUfuugggsusu | 2658 | AACCCAAAGUUUACUCAAGACUA | 2750 |
| 397262 | | | | | | |
| AD- | cscsaaa(Ghd)UfuUfAfCfucaagacuaa | 2567 | usUfsaguCfuUfGfaguaAfaCfuuuggsgsu | 2659 | ACCCAAAGUUUACUCAAGACUAC | 2751 |
| 397263 | | | | | | |
| AD- | csasuca(Uhd)GfuGfUfUfcaacaugcua | 2568 | usAfsgcaUfgUfUfgaacAfcAfugaugsasg | 2660 | CUCAUCAUGUGUUCAACAUGCUG | 2752 |
| 397264 | | | | | | |
| AD- | asascau(Ghd)CfuGfAfAfgaaguacgua | 2569 | usAfscguAfcUfUfcuucAfgCfauguusgsa | 2661 | UCAACAUGCUGAAGAAGUACGUC | 2753 |
| 397265 | | | | | | |
| AD- | ususcug(Uhd)GfgUfAfAfacucaacaua | 2570 | usAfsuguUfgAfGfuuuaCfcAfcagaascsa | 2662 | UGUUCUGUGGUAAACUCAACAUG | 2754 |
| 397266 | | | | | | |
| AD- | uscsugu(Ghd)GfuAfAfAfcucaacauga | 2571 | usCfsaugUfuGfAfguuuAfcCfacagasasc | 2663 | GUUCUGUGGUAAACUCAACAUGC | 2755 |
| 397267 | | | | | | |

TABLE 21
mmAPP-Targeting RNAi Agents, Unmodified Sequences, Mouse NM_001198823.1 Targeting

| Duplex | | SEQ ID | Position in | | SEQ ID | Position in |
|---|---|---|---|---|---|---|
| Name | Sense Sequence (5′ to 3′) | NO | NM_001198823.1 | Antisense Sequence (5′ to 3′) | NO | NM_001198823.1 |
| AD-397183 | CCAUGUUCUGUGGUAAACUCA | 2756 | 253-273 | UGAGUUUACCACAGAACAUGGCG | 2848 | 251-273 |
| AD-397175 | CAUGUUCUGUGGUAAACUCAA | 2757 | 254-274 | UUGAGUUUACCACAGAACAUGGC | 2849 | 252-274 |
| AD-397177 | AUGUUCUGUGGUAAACUCAAA | 2758 | 255-275 | UUUGAGUUUACCACAGAACAUGG | 2850 | 253-275 |
| AD-397176 | UGUUCUGUGGUAAACUCAACA | 2759 | 256-276 | UGUUGAGUUUACCACAGAACAUG | 2851 | 254-276 |
| AD-397260 | GUUCUGUGGUAAACUCAACAA | 2760 | 257-277 | UUGUUGAGUUUACCACAGAACAU | 2852 | 255-277 |
| AD-397266 | UUCUGUGGUAAACUCAACAUA | 2761 | 258-278 | UAUGUUGAGUUUACCACAGAACA | 2853 | 256-278 |
| AD-397267 | UCUGUGGUAAACUCAACAUGA | 2762 | 259-279 | UCAUGUUGAGUUUACCACAGAAC | 2854 | 257-279 |
| AD-397178 | CUGUGGUAAACUCAACAUGCA | 2763 | 260-280 | UGCAUGUUGAGUUUACCACAGAA | 2855 | 258-280 |
| AD-397180 | UGUGGUAAACUCAACAUGCAA | 2764 | 261-281 | UUGCAUGUUGAGUUUACCACAGA | 2856 | 259-281 |
| AD-39718 | GUGGUAAACUCAACAUGCACA | 2765 | 262-282 | UGUGCAUGUUGAGUUUACCACAG | 2857 | 260-282 |
| AD-397179 | GGUAAACUCAACAUGCACAUA | 2766 | 264-284 | UAUGUGCAUGUUGAGUUUACCAC | 2858 | 262-284 |
| AD-397224 | GUACUGCCAAGAGGUCUACCA | 2767 | 362-382 | UGGUAGACCUCUUGGCAGUACUG | 2859 | 360-382 |
| AD-397216 | UACUGCCAAGAGGUCUACCCA | 2768 | 363-383 | UGGGUAGACCUCUUGGCAGUACU | 2860 | 361-383 |
| AD-397225 | ACUGCCAAGAGGUCUACCCUA | 2769 | 364-384 | UAGGGUAGACCUCUUGGCAGUAC | 2861 | 362-384 |
| AD-397203 | CUGAACUGCAGAUCACAAACA | 2770 | 382-402 | UGUUUGUGAUCUGCAGUUCAGGG | 2862 | 380-402 |
| AD-397185 | GAACUGCAGAUCACAAACGUA | 2771 | 384-404 | UACGUUUGUGAUCUGCAGUUCAG | 2863 | 382-404 |
| AD-397195 | CACCCACAUCGUGAUUCCUUA | 2772 | 473-493 | UAAGGAAUCACGAUGUGGGUGUG | 2864 | 471-493 |
| AD-397204 | CCACAUCGUGAUUCCUUACCA | 2773 | 476-496 | UGGUAAGGAAUCACGAUGUGGGU | 2865 | 474-496 |
| AD-397191 | CACAUCGUGAUUCCUUACCGA | 2774 | 477-497 | UCGGUAAGGAAUCACGAUGUGGG | 2866 | 475-497 |
| AD-397251 | CCUUACCGUUGCCUAGUUGGA | 2775 | 489-509 | UCCAACUAGGCAACGGUAAGGAA | 2867 | 487-509 |
| AD-397240 | CUUACCGUUGCCUAGUUGGUA | 2776 | 490-510 | UACCAACUAGGCAACGGUAAGGA | 2868 | 488-510 |
| AD-397205 | GUGCCCGACAAGUGCAAGUUA | 2777 | 534-554 | UAACUUGCACUUGUCGGGCACGA | 2869 | 532-554 |
| AD-397254 | CGGAUGGAUGUUUGUGAGACA | 2778 | 567-587 | UGUCUCACAAACAUCCAUCCGCU | 2870 | 565-587 |
| AD-397259 | ACCGUCGCCAAAGAGACAUGA | 2779 | 603-623 | UCAUGUCUCUUUGGCGACGGUGU | 2871 | 601-623 |
| AD-397247 | GCAGCGAGAAGAGCACUAACA | 2780 | 622-642 | UGUUAGUGCUCUUCUCGCUGCAU | 2872 | 620-642 |
| AD-397233 | CAGCGAGAAGAGCACUAACUA | 2781 | 623-643 | UAGUUAGUGCUCUUCUCGCUGCA | 2873 | 621-643 |
| AD-397181 | GAAGAGCACUAACUUGCACGA | 2782 | 629-649 | UCGUGCAAGUUAGUGCUCUUCUC | 2874 | 627-649 |
| AD-397186 | AAGAGCACUAACUUGCACGAA | 2783 | 630-650 | UUCGUGCAAGUUAGUGCUCUUCU | 2875 | 628-650 |
| AD-397196 | AGAGCACUAACUUGCACGACA | 2784 | 631-651 | UGUCGUGCAAGUUAGUGCUCUUC | 2876 | 629-651 |
| AD-397187 | AGCACUAACUUGCACGACUAA | 2785 | 633-653 | UUAGUCGUGCAAGUUAGUGCUCU | 2877 | 631-653 |
| AD-397188 | GCACUAACUUGCACGACUAUA | 2786 | 634-654 | UAUAGUCGUGCAAGUUAGUGCUC | 2878 | 632-654 |
| AD-397197 | CACUAACUUGCACGACUAUGA | 2787 | 635-655 | UCAUAGUCGUGCAAGUUAGUGCU | 2879 | 633-655 |
| AD-397226 | ACUAACUUGCACGACUAUGGA | 2788 | 636-656 | UCCAUAGUCGUGCAAGUUAGUGC | 2880 | 634-656 |
| AD-397212 | UUGCACGACUAUGGCAUGCUA | 2789 | 642-662 | UAGCAUGCCAUAGUCGUGCAAGU | 2881 | 640-662 |
| AD-397182 | CCGCUGGUACUUUGAUGUCAA | 2790 | 1064-1084 | UUGACAUCAAAGUACCAGCGGGA | 2882 | 1062-1084 |
| AD-397261 | GGUACUUUGAUGUCACUGAAA | 2791 | 1069-1089 | UUUCAGUGACAUCAAAGUACCAG | 2883 | 1067-1089 |
| AD-397241 | GUGUGUCCCAUUCUUUUACGA | 2792 | 1094-1114 | UCGUAAAAGAAUGGGACACACUU | 2884 | 1092-1114 |
| AD-397245 | UGUGUCCCAUUCUUUUACGGA | 2793 | 1095-1115 | UCCGUAAAAGAAUGGGACACACU | 2885 | 1093-1115 |
| AD-397242 | GUGUCCCAUUCUUUUACGGCA | 2794 | 1096-1116 | UGCCGUAAAAGAAUGGGACACAC | 2886 | 1094-1116 |
| AD-397236 | UGUCCCAUUCUUUUACGGCGA | 2795 | 1097-1117 | UCGCCGUAAAAGAAUGGGACACA | 2887 | 1095-1117 |
| AD-397227 | GUCCCAUUCUUUUACGGCGGA | 2796 | 1098-1118 | UCCGCCGUAAAAGAAUGGGACAC | 2888 | 1096-1118 |
| AD-397255 | GACACGGAAGAGUACUGCAUA | 2797 | 1143-1163 | UAUGCAGUACUCUUCCGUGUCAA | 2889 | 1141-1163 |
| AD-397234 | AGCGUGUCAACCCAAAGUUUA | 2798 | 1176-1196 | UAAACUUUGGGUUGACACGCUGC | 2890 | 1174-1196 |
| AD-397237 | GUGUCAACCCAAAGUUUACUA | 2799 | 1179-1199 | UAGUAAACUUUGGGUUGACACGC | 2891 | 1177-1199 |
| AD-397235 | UGUCAACCCAAAGUUUACUCA | 2800 | 1180-1200 | UGAGUAAACUUUGGGUUGACACG | 2892 | 1178-1200 |
| AD-397262 | CCCAAAGUUUACUCAAGACUA | 2801 | 1186-1206 | UAGUCUUGAGUAAACUUUGGGUU | 2893 | 1184-1206 |
| AD-397263 | CCAAAGUUUACUCAAGACUAA | 2802 | 1187-1207 | UUAGUCUUGAGUAAACUUUGGGU | 2894 | 1185-1207 |
| AD-397189 | AAAGUUUACUCAAGACUACCA | 2803 | 1189-1209 | UGGUAGUCUUGAGUAAACUUUGG | 2895 | 1187-1209 |
| AD-397198 | CUCAAGACUACCAGUGAACCA | 2804 | 1197-1217 | UGGUUCACUGGUAGUCUUGAGUA | 2896 | 1195-1217 |
| AD-397206 | GACUACCAGUGAACCUCUUCA | 2805 | 1202-1222 | UGAAGAGGUUCACUGGUAGUCUU | 2897 | 1200-1222 |
| AD-397238 | AAGAUCCUGAUAAACUUCCCA | 2806 | 1225-1245 | UGGGAAGUUUAUCAGGAUCUUGG | 2898 | 1223-1245 |
| AD-397239 | AGAUCCUGAUAAACUUCCCAA | 2807 | 1226-1246 | UUGGGAAGUUUAUCAGGAUCUUG | 2899 | 1224-1246 |
| AD-397252 | AUCCUGAUAAACUUCCCACGA | 2808 | 1228-1248 | UCGUGGGAAGUUUAUCAGGAUCU | 2900 | 1226-1248 |
| AD-397249 | UCCUGAUAAACUUCCCACGAA | 2809 | 1229-1249 | UUCGUGGGAAGUUUAUCAGGAUC | 2901 | 1227-1249 |
| AD-397253 | CCUGAUAAACUUCCCACGACA | 2810 | 1230-1250 | UGUCGUGGGAAGUUUAUCAGGAU | 2902 | 1228-1250 |
| AD-397217 | CACCGAGAGAGAAUGUCCCAA | 2811 | 1353-1373 | UUGGGACAUUCUCUCUCGGUGCU | 2903 | 1351-1373 |
| AD-397213 | UCCCAGGUCAUGAGAGAAUGA | 2812 | 1368-1388 | UCAUUCUCUCAUGACCUGGGACA | 2904 | 1366-1388 |
| AD-397228 | AAGCUGACAAGAAGGCCGUUA | 2813 | 1423-1443 | UAACGGCCUUCUUGUCAGCUUUG | 2905 | 1421-1443 |
| AD-397229 | UGACAAGAAGGCCGUUAUCCA | 2814 | 1427-1447 | UGGAUAACGGCCUUCUUGUCAGC | 2906 | 1425-1447 |
| AD-397208 | GGCCCUCGAGAAUUACAUCAA | 2815 | 1562-1582 | UUGAUGUAAUUCUCGAGGGCCAG | 2907 | 1560-1582 |
| AD-397218 | CAAGGCCUCAUCAUGUGUUCA | 2816 | 1603-1623 | UGAACACAUGAUGAGGCCUUGGG | 2908 | 1601-1623 |
| AD-397264 | CAUCAUGUGUUCAACAUGCUA | 2817 | 1611-1631 | UAGCAUGUUGAACACAUGAUGAG | 2909 | 1609-1631 |
| AD-397265 | AACAUGCUGAAGAAGUACGUA | 2818 | 1623-1643 | UACGUACUUCUUCAGCAUGUUGA | 2910 | 1621-1643 |
| AD-397209 | CAUGCUGAAGAAGUACGUCCA | 2819 | 1625-1645 | UGGACGUACUUCUUCAGCAUGUU | 2911 | 1623-1645 |
| AD-397192 | AUGCUGAAGAAGUACGUCCGA | 2820 | 1626-1646 | UCGGACGUACUUCUUCAGCAUGU | 2912 | 1624-1646 |
| AD-397210 | UGCUGAAGAAGUACGUCCGUA | 2821 | 1627-1647 | UACGGACGUACUUCUUCAGCAUG | 2913 | 1625-1647 |
| AD-397219 | GCUGAAGAAGUACGUCCGUGA | 2822 | 1628-1648 | UCACGGACGUACUUCUUCAGCAU | 2914 | 1626-1648 |
| AD-397214 | CUGAAGAAGUACGUCCGUGCA | 2823 | 1629-1649 | UGCACGGACGUACUUCUUCAGCA | 2915 | 1627-1649 |
| AD-397199 | AGCACACCCUAAAGCAUUUUA | 2824 | 1666-1686 | UAAAAUGCUUUAGGGUGUGCUGU | 2916 | 1664-1686 |
| AD-397220 | AAGCAUUUUGAACAUGUGCGA | 2825 | 1677-1697 | UCGCACAUGUUCAAAAUGCUUUA | 2917 | 1675-1697 |
| AD-397230 | AGCAUUUUGAACAUGUGCGCA | 2826 | 1678-1698 | UGCGCACAUGUUCAAAAUGCUUU | 2918 | 1676-1698 |
| AD-397221 | CACCUCCGUGUGAUCUACGAA | 2827 | 1746-1766 | UUCGUAGAUCACACGGAGGUGUG | 2919 | 1744-1766 |
| AD-397215 | CGUGUGAUCUACGAGCGCAUA | 2828 | 1752-1772 | UAUGCGCUCGUAGAUCACACGGA | 2920 | 1750-1772 |
| AD-397231 | UGUGAUCUACGAGCGCAUGAA | 2829 | 1754-1774 | UUCAUGCGCUCGUAGAUCACACG | 2921 | 1752-1774 |
| AD-397193 | GAGCGCAUGAACCAGUCUCUA | 2830 | 1764-1784 | UAGAGACUGGUUCAUGCGCUCGU | 2922 | 1762-1784 |
| AD-397190 | CGCAUGAACCAGUCUCUGUCA | 2831 | 1767-1787 | UGACAGAGACUGGUUCAUGCGCU | 2923 | 1765-1787 |
| AD-397222 | GAAGGAGCAGAACUACUCCGA | 2832 | 1850-1870 | UCGGAGUAGUUCUGCUCCUUCUG | 2924 | 1848-1870 |
| AD-397200 | AAGGAGCAGAACUACUCCGAA | 2833 | 1851-1871 | UUCGGAGUAGUUCUGCUCCUUCU | 2925 | 1849-1871 |
| AD-397201 | GGAGCAGAACUACUCCGACGA | 2834 | 1853-1873 | UCGUCGGAGUAGUUCUGCUCCUU | 2926 | 1851-1873 |
| AD-397194 | GAGCAGAACUACUCCGACGAA | 2835 | 1854-1874 | UUCGUCGGAGUAGUUCUGCUCCU | 2927 | 1852-1874 |
| AD-397248 | CAGAAUUCGGACAUGAUUCAA | 2836 | 2167-2187 | UUGAAUCAUGUCCGAAUUCUGCA | 2928 | 2165-2187 |
| AD-397207 | GUCCGCCAUCAAAAACUGGUA | 2837 | 2196-2216 | UACCAGUUUUUGAUGGCGGACUU | 2929 | 2194-2216 |
| AD-397211 | UCCGCCAUCAAAAACUGGUGA | 2838 | 2197-2217 | UCACCAGUUUUUGAUGGCGGACU | 2930 | 2195-2217 |
| AD-397243 | CAUAGCAACCGUGAUUGUCAA | 2839 | 2282-2302 | UUGACAAUCACGGUUGCUAUGAC | 2931 | 2280-2302 |
| AD-397246 | GCAACCGUGAUUGUCAUCACA | 2840 | 2286-2306 | UGUGAUGACAAUCACGGUUGCUA | 2932 | 2284-2306 |
| AD-397223 | GAAGAAACAGUACACAUCCAA | 2841 | 2321-2341 | UUGGAUGUGUACUGUUUCUUCUU | 2933 | 2319-2341 |
| AD-397202 | GAAACAGUACACAUCCAUCCA | 2842 | 2324-2344 | UGGAUGGAUGUGUACUGUUUCUU | 2934 | 2322-2344 |
| AD-397256 | GCAGCAGAACGGAUAUGAGAA | 2843 | 2405-2425 | UUCUCAUAUCCGUUCUGCUGCAU | 2935 | 2403-2425 |
| AD-397257 | GCAGAACGGAUAUGAGAAUCA | 2844 | 2408-2428 | UGAUUCUCAUAUCCGUUCUGCUG | 2936 | 2406-2428 |
| AD-397258 | CAGAACGGAUAUGAGAAUCCA | 2845 | 2409-2429 | UGGAUUCUCAUAUCCGUUCUGCU | 2937 | 2407-2429 |
| AD-397250 | AGAACGGAUAUGAGAAUCCAA | 2846 | 2410-2430 | UUGGAUUCUCAUAUCCGUUCUGC | 2938 | 2408-2430 |
| AD-397244 | GAACGGAUAUGAGAAUCCAAA | 2847 | 2411-2431 | UUUGGAUUCUCAUAUCCGUUCUG | 2939 | 2409-2431 |

TABLE 22
The AD-1397409 luciferase-targeting siRNA control of the
instant disclosure has the following sequences.

| strand | | SEQ ID NO: |
|---|---|---|
| | oligoSeq (5′-3′) | |
| sense | gsgsgag(Uhd)CfaAfAfGfuucuguuusgsa | 2949 |
| antis | VPusCfsaaaCfaGfAfacuuUfgAfcucccsasu | 2950 |
| | transSeq (5′-3′) | |
| sense | GGGAGUCAAAGUUCUGUUUGA | 2951 |
| antis | UCAAACAGAACUUUGACUCCCAU | 2952 |

### EQUIVALENTS

[0681] Those skilled in the art will recognize or be able to ascertain using no more than routine experimentation, many equivalents to the specific embodiments and methods described herein. Such equivalents are intended to be encompassed by the scope of the following claims.

We claim:

1. A method for reducing endosome size in a mammalian cell having enlarged endosomes, the method comprising contacting the mammalian cell with an amyloid precursor protein (APP)-targeting double stranded ribonucleic acid inhibitory (dsRNAi) agent in an amount sufficient to reduce endosome size in the mammalian cell, thereby reducing endosome size in the mammalian cell.

2. The method of claim 1, wherein the mammalian cell has a mutation that results in enlarged endosomes.

3. The method of claim 2, wherein the mutation that results in enlarged endosomes is selected from the group consisting of a presenilin 1 (PSEN1) mutation and an APP mutation and combinations thereof.

4. The method of claim 3, wherein the PSEN1 mutation encodes for an amino acid substitution in presenilin 1 polypeptide selected from the group consisting of A136G, A231T, A246E, A260V, A275V, A285V, A396T, A409T, A426P, A431E, A434C, A79V, C263R, C410Y, C92S, D333G, ΔD40, ΔE9, ΔI167, ΔI83/M84, ΔL166, ΔS169, ΔT440, E120D, E120K, E123K, E184D, E184G, E273A, E280A, E280G, E318G, F105I, F176L, F237I, F386S, FI77L, G183V, G206A, G206S, G209R, G209V, G217R, G266S, G378E, G378V, G384A, G394V, H131R, H163R, H163Y, H214D, I143T, I143V, I168T, I202F, I213L, I229F, I238M, I437V, I439V, InsR352, K155_insFI, K239N, L113Q, L134R, L150P, L153V, L166P, L171P, L173W, L174M, L219F, L226F, L235P, L235R, L235V, L248R, L250S, L262F, L271V, L282R, L282V, L286V, L381V, L392V, L418F, L420R, L424V, L435F, L85P, M139V, M146L, M146V, M233L, M233T, N135D, N405S, P117A, P264L, P267S, P284S, P436S, Q222R, Q223R, R108Q, R269G, R278K, R352C, R358Q, R35Q, R377W, S169P, S170F, S178P, S212Y, S230I, S365A, S390I, T116N, T147I, T245P, T274R, T291P, T354I, T99A, V261F, V272A, V391F, V412I, V82L, V89L, V94M, V96F, V97L, W165G, Y115H, Y154N, Y256S, and combinations thereof, with residue numbering as in SEQ ID NO: 3.

5. The method of claim 4, wherein the PSEN1 mutation encodes for an amino acid substitution in presenilin 1 polypeptide selected from the group consisting of M146V, L166P, M233L and A246E, with residue numbering as in SEQ ID NO: 3.

6. The method of claim 3, wherein the APP mutation encodes for an amino acid substitution in amyloid precursor protein selected from the group consisting of KM670/671NL (Swedish), A673V, D678H (Taiwanese), D678N (Tottori), E682K (Leuven), K687N, F690_V695del, A692G (Flemish), E693del, E693G, E693K, E693Q (Dutch), D694N (Iowa), T714A (Iranian), T714I (Austrian), V715A (German), V715M (French), I716F (Iberian), I716M, I716T, I716V (Florida), V717F (Indiana), V717G, V717I (London), V717L, T719N, T719P, M722K, L723P (Australian), and K724N (Belgian), with residue numbering as in SEQ ID NO: 12.

7. The method of claim 6, wherein the APP mutation encodes for an amino acid substitution in amyloid precursor protein selected from the group consisting of KM670/671NL (Swedish), A692G and V717G, with residue numbering as in SEQ ID NO: 12.

8. The method of claim 2, wherein the mammalian cell is homozygous for the mutation that results in enlarged endosomes.

9. The method of claim 1, wherein the mammalian cell is a neuronal cell, optionally a human neuronal cell, optionally a human induced pluripotent stem cell (iPSC) derived neuron.

10. The method of claim 1, wherein the amount of dsRNAi agent sufficient to reduce endosome size in the mammalian cell is less than 10 nM in the environment of the cell, optionally less than 1 nM in the environment of the cell, optionally less than 0.1 nM in the environment of the cell.

11. The method of claim 1, wherein average endosome size in the mammalian cell contacted with the dsRNAi agent is reduced by at least 30%, as compared to a mammalian cell in the absence of the dsRNAi agent, optionally wherein average endosome size in the mammalian cell contacted with the dsRNAi agent is reduced by at least 50%, as compared to a mammalian cell in the absence of the dsRNAi agent.

12. The method of claim 1, wherein the amount of dsRNAi agent is sufficient to reduce the average endosome size in a mammalian cell by at least 30%, as compared to a mammalian cell in the absence of the dsRNAi agent, optionally the amount of dsRNAi agent sufficient to reduce the average endosome size in a mammalian cell by at least 50%, as compared to a mammalian cell in the absence of the dsRNAi agent, optionally wherein endosome size is assayed via immunofluorescent imaging of Rab5.

13. The method of claim 1, wherein endosome size is determined by detecting the size of Rab5-containing intracellular compartments in the mammalian cell, optionally wherein the size of Rab5-containing intracellular compartments is determined via immunofluorescent imaging of Rab5.

14. The method of claim 1, wherein the level of one or more APP C-terminal fragment (CTF) selected from the group consisting of α-CTF and β-CTF is reduced in the contacted mammalian cell, as compared to an appropriate control mammalian cell.

15. The method of claim 1, wherein the amount of dsRNAi agent is sufficient to reduce β-CTF levels in a mammalian cell by at least 30%, as compared to a mammalian cell in the absence of the dsRNAi agent, optionally the amount of dsRNAi agent is sufficient to reduce β-CTF levels in a mammalian cell by at least 50%, as compared to a mammalian cell in the absence of the dsRNAi agent.

16. The method of claim 1, wherein the dsRNAi agent is selected from Tables 2-21.

17. The method of claim 1, wherein the mammalian cell is within a subject.

18. The method of claim 17, wherein the subject is a human.

19. The method of claim 17, wherein the subject is selected from the group consisting of a rhesus monkey, a cynomolgous monkey, a mouse, and a rat.

20. The method of claim 18, wherein the human subject suffers from an APP-associated disorder characterized by enlarged neuronal cell endosomes, optionally wherein the human subject suffers from Alzheimer's disease (AD) or Down syndrome (DS).

21. The method of claim 20, wherein the APP-associated disorder characterized by enlarged neuronal cell endosomes is AD, optionally wherein the APP-associated disorder characterized by enlarged neuronal cell endosomes is early onset familial AD (EOFAD).

22. The method of any one of the preceding claims, wherein APP expression is reduced by at least about 30% in the cell administered the APP-targeting dsRNAi agent, optionally wherein APP expression is reduced by at least about 50% in the cell administered the APP-targeting dsRNAi agent, optionally wherein APP expression is reduced by at least about 80% in the cell administered the APP-targeting dsRNAi agent.

23. A method for identifying a subject as having or at risk of developing a disease or disorder characterized by enlarged endosomes in neuronal cells and selecting a treatment for the subject, the method comprising:
a) obtaining a nucleic acid sample from the subject;
b) identifying the subject as having a mutation in presenilin 1 (PSEN1) or amyloid precursor protein (APP) associated with enlargement of endosomes in neuronal cells having the PSEN1 or APP mutation; and
c) selecting an amyloid precursor protein (APP)-targeting double stranded ribonucleic acid inhibitory (dsRNAi) agent for administration to the subject in an amount sufficient to reduce APP levels in neuronal cells of the subject,
thereby identifying the subject as having or at risk of developing a disease or disorder characterized by enlarged endosomes in neuronal cells and selecting a treatment for the subject.

24. The method of claim 23, wherein the disease or disorder characterized by enlarged endosomes in neuronal cells is Alzheimer's disease (AD), Down syndrome (DS) or frontotemporal dementia (FTD), optionally wherein the AD is early onset familial AD (EOFAD).

25. The method of claim 23, wherein the mutation in PSEN1 or APP associated with enlargement of endosomes in neuronal cells having the PSEN1 or APP mutation is a PSEN1 mutation, optionally wherein the PSEN1 mutation encodes for an amino acid substitution in presenilin 1 polypeptide selected from the group consisting of M146V, L166P and A246E, with residue numbering as in SEQ ID NO: 3.

26. The method of claim 23, wherein the mutation in PSEN1 or APP associated with enlargement of endosomes in neuronal cells having the PSEN1 or APP mutation is an APP mutation, optionally wherein the APP mutation encodes for an amino acid substitution in amyloid precursor protein selected from the group consisting of KM670/671NL (Swedish), A673V, D678H (Taiwanese), D678N (Tottori), E682K (Leuven), K687N, F690_V695del, A692G (Flemish), E693del, E693G, E693K, E693Q (Dutch), D694N (Iowa), T714A (Iranian), T714I (Austrian), V715A (German), V715M (French), I716F (Iberian), I716M, I716T, I716V (Florida), V717F (Indiana), V717G, V717I (London), V717L, T719N, T719P, M722K, L723P (Australian), and K724N (Belgian), with residue numbering as in SEQ ID NO: 12, optionally wherein the APP mutation encodes for an amino acid substitution in amyloid precursor protein selected from the group consisting of KM670/671NL (Swedish), A692G and V717G, with residue numbering as in SEQ ID NO: 12.

27. The method of claim 23, wherein the subject is homozygous for the mutation in PSEN1 or APP.

28. The method of claim 23, wherein the dsRNAi agent is selected from Tables 2-21.

29. The method of claim 23, wherein the subject is a human.

30. The method of claim 23, wherein the subject is selected from the group consisting of a rhesus monkey, a cynomolgous monkey, a mouse, and a rat.

31. The method of claim 23 further comprising administering the selected APP-targeting dsRNAi agent to the subject.

32. The method of claim 31, wherein endosome size in neuronal cells of the subject administered the selected APP-targeting dsRNAi agent is reduced, as compared to an appropriate control and/or an untreated subject, optionally wherein average endosome size in neuronal cells of the subject administered the selected APP-targeting dsRNAi agent is reduced by at least 30%, as compared to an appropriate control and/or an untreated subject, optionally wherein average endosome size in neuronal cells of the subject administered the selected APP-targeting dsRNAi agent is reduced by at least 50%, as compared to an appropriate control and/or an untreated subject.

33. The method of claim 32, wherein endosome size is determined by detecting the size of Rab5-containing intracellular compartments in the neuronal cells of the subject, optionally wherein the size of Rab5-containing intracellular compartments is determined via immunofluorescent imaging of Rab5.

34. The method of claim 31, wherein synaptic transmission of neuronal cells of the subject administered the selected APP-targeting dsRNAi agent is improved, as compared to an appropriate control and/or an untreated subject.

35. The method of claim 31, wherein a symptom of AD or DS selected from the group consisting of short-term memory and cognition is improved in the subject administered the selected APP-targeting dsRNAi agent, as compared to an appropriate control and/or an untreated subject.

36. The method of claim 31, wherein the dose of the selected APP-targeting dsRNAi agent sufficient to reduce APP levels in neuronal cells of the subject is a dose of about 0.01 mg/kg to about 50 mg/kg, optionally a dose of about 2-10 mg/kg.

37. The method of claim 31, wherein the level of one or more APP C-terminal fragment (CTF) selected from the group consisting of α-CTF and β-CTF is reduced in the subject administered the selected APP-targeting dsRNAi agent, as compared to an appropriate control and/or an untreated subject.

38. The method of claim 31, further comprising administering an additional therapeutic agent to the subject.

39. The method of claim 31, wherein the double stranded RNAi agent is administered to the subject intrathecally.

40. The method of any one of claims 31 to 39, wherein APP expression is reduced by at least about 30% in the subject administered the APP-targeting dsRNAi agent, optionally wherein APP expression is reduced by at least about 50% in the subject administered the APP-targeting dsRNAi agent, optionally wherein APP expression is reduced by at least about 80% in the subject administered the APP-targeting dsRNAi agent.

41. A method for identifying a subject as having a disease or disorder characterized by enlarged endosomes in neuronal cells and selecting a treatment for the subject, the method comprising:
a) obtaining a neuronal cell sample or fluid sample from a neuronal cell environment of the subject;
b) identifying the subject as having elevated β-CTF levels in the neuronal cell or in the fluid sample from the neuronal cell environment as an indicator for enlarged endosomes in neuronal cells of the subject; and
c) selecting an amyloid precursor protein (APP)-targeting double stranded ribonucleic acid inhibitory (dsRNAi) agent for administration to the subject in an amount sufficient to reduce β-CTF levels in neuronal cells of the subject,
thereby identifying a subject as having a disease or disorder characterized by enlarged endosomes in neuronal cells and selecting a treatment for the subject.

42. The method of claim 41, wherein the disease or disorder characterized by enlarged endosomes in neuronal cells is Alzheimer's disease (AD), Down syndrome (DS) or frontotemporal dementia (FTD), optionally wherein the AD is early onset familial AD (EOFAD).

43. The method of claim 41, wherein endosome size is determined by detecting the size of Rab5-containing intracellular compartments in the neuronal cells of the subject, optionally wherein the size of Rab5-containing intracellular compartments is determined via immunofluorescent imaging of Rab5.

44. The method of claim 41, wherein the neuronal cell sample or fluid sample from a neuronal cell environment is obtained from the central nervous system or peripheral nervous system of the subject.

45. The method of claim 41, wherein the subject has a mutation in presenilin 1 (PSEN1), optionally wherein the PSEN1 mutation encodes for an amino acid substitution in presenilin 1 polypeptide selected from the group consisting of M146V, L166P and A246E, with residue numbering as in SEQ ID NO: 3, optionally wherein the subject is homozygous for the mutation in PSEN1.

46. The method of claim 41, wherein the subject has a mutation in APP, optionally wherein the APP mutation encodes for an amino acid substitution in amyloid precursor protein selected from the group consisting of KM670/671NL (Swedish), A673V, D678H (Taiwanese), D678N (Tottori), E682K (Leuven), K687N, F690_V695del, A692G (Flemish), E693del, E693G, E693K, E693Q (Dutch), D694N (Iowa), T714A (Iranian), T714I (Austrian), V715A (German), V715M (French), I716F (Iberian), I716M, I716T, I716V (Florida), V717F (Indiana), V717G, V717I (London), V717L, T719N, T719P, M722K, L723P (Australian), and K724N (Belgian), with residue numbering as in SEQ ID NO: 12, optionally wherein the APP mutation encodes for an amino acid substitution in amyloid precursor protein selected from the group consisting of KM670/671NL (Swedish), A692G and V717G, with residue numbering as in SEQ ID NO: 12.

47. The method of claim 41, wherein the dsRNAi agent is selected from Tables 2-21.

48. The method of claim 41, wherein the subject is a human.

49. The method of claim 41, wherein the subject is selected from the group consisting of a rhesus monkey, a cynomolgous monkey, a mouse, and a rat.

50. The method of claim 41 further comprising administering the selected APP-targeting dsRNAi agent to the subject.

51. The method of claim 50, wherein average endosome size in neuronal cells of the subject administered the selected APP-targeting dsRNAi agent is reduced by at least 30%, as compared to an appropriate control and/or an untreated subject, optionally wherein average endosome size in neuronal cells of the subject administered the selected APP-targeting dsRNAi agent is reduced by at least 50%, as compared to an appropriate control and/or an untreated subject.

52. The method of claim 50, wherein synaptic transmission of neuronal cells of the subject administered the selected APP-targeting dsRNAi agent is improved, as compared to an appropriate control and/or an untreated subject.

53. The method of claim 50, wherein a symptom of AD or DS selected from the group consisting of short-term memory and cognition is improved in the subject administered the selected APP-targeting dsRNAi agent, as compared to an appropriate control and/or an untreated subject.

54. The method of claim 50, wherein the dose of the selected APP-targeting dsRNAi agent sufficient to reduce β-CTF levels in neuronal cells of the subject is a dose of about 0.01 mg/kg to about 50 mg/kg, optionally a dose of about 2-10 mg/kg.

55. The method of claim 50, wherein the level of one or more APP C-terminal fragment (CTF) selected from the group consisting of α-CTF and β-CTF is reduced in the subject administered the selected APP-targeting dsRNAi agent, as compared to an appropriate control and/or an untreated subject.

56. The method of claim 50, further comprising administering an additional therapeutic agent to the subject.

57. The method of claim 50, wherein the double stranded RNAi agent is administered to the subject intrathecally.

58. The method of any one of claims 50 to 57, wherein APP expression is reduced by at least about 30% in the subject administered the APP-targeting dsRNAi agent, optionally wherein APP expression is reduced by at least about 50% in the subject administered the APP-targeting dsRNAi agent, optionally wherein APP expression is reduced by at least about 80% in the subject administered the APP-targeting dsRNAi agent.

59. The method of claim 50, wherein the level of β-CTF is reduced in the subject administered the selected APP-targeting dsRNAi agent, as compared to an appropriate control and/or an untreated subject.

60. A method for reducing inflammation and/or expression of Iba1 mRNA in a subject having or at risk of developing Alzheimer's Disease (AD), the method comprising administering to the subject an amyloid precursor protein (APP)-targeting double stranded ribonucleic acid inhibitory (dsRNAi) agent in an amount sufficient to reduce inflammation and/or expression of Iba1 mRNA in the subject.

The application's sequence listing, which the Patent Office published only in electronic form, follows.

SEQUENCE LISTING (2952 sequences)

SEQ ID NO: 1 - DNA, 6018 bp, Homo sapiens
  source 1..6018: mol_type = other DNA
ggaaacaaaacagcggctggtctggaaggaacctgagctacgagccgcggcggcagcggggcggcggggaagcgtatacctaatctgggagcctgcaagtgacaacagcctttgcggtccttagacagcttggcctggaggagaacacatgaaagaaagaacctcaagaggctttgttttctgtgaaacagtatttctatacagttgctccaatgacagagttacctgcaccgttgtcctacttccagaatgcacagatgtctgaggacaaccacctgagcaatactgtacgtagccagaatgacaatagagaacggcaggagcacaacgacagacggagccttggccaccctgagccattatctaatggacgaccccagggtaactcccggcaggtggtggagcaagatgaggaagaagatgaggagctgacattgaaatatggcgccaagcatgtgatcatgctctttgtccctgtgactctctgcatggtggtggtcgtggctaccattaagtcagtcagcttttatacccggaaggatgggcagctaatctataccccattcacagaagataccgagactgtgggccagagagccctgcactcaattctgaatgctgccatcatgatcagtgtcattgttgtcatgactatcctcctggtggttctgtataaatacaggtgctataaggtcatccatgcctggcttattatatcatctctattgttgctgttctttttttcattcatttacttgggggaagtgtttaaaacctataacgttgctgtggactacattactgttgcactcctgatctggaattttggtgtggtgggaatgatttccattcactggaaaggtccacttcgactccagcaggcatatctcattatgattagtgccctcatggccctggtgtttatcaagtacctccctgaatggactgcgtggctcatcttggctgtgatttcagtatatgatttagtggctgttttgtgtccgaaaggtccacttcgtatgctggttgaaacagctcaggagagaaatgaaacgctttttccagctctcatttactcctcaacaatggtgtggttggtgaatatggcagaaggagacccggaagctcaaaggagagtatccaaaaattccaagtataatgcagaaagcacagaaagggagtcacaagacactgttgcagagaatgatgatggcgggttcagtgaggaatgggaagcccagagggacagtcatctagggcctcatcgctctacacctgagtcacgagctgctgtccaggaactttccagcagtatcctcgctggtgaagacccagaggaaaggggagtaaaacttggattgggagatttcattttctacagtgttctggttggtaaagcctcagcaacagccagtggagactggaacacaaccatagcctgtttcgtagccatattaattggtttgtgccttacattattactccttgccattttcaagaaagcattgccagctcttccaatctccatcacctttgggcttgttttctactttgccacagattatcttgtacagccttttatggaccaattagcattccatcaattttatatctagcatatttgcggttagaatcccatggatgtttcttctttgactataacaaaatctggggaggacaaaggtgattttcctgtgtccacatctaacaaagtcaagattcccggctggacttttgcagcttccttccaagtcttcctgaccaccttgcactattggactttggaaggaggtgcctatagaaaacgattttgaacatacttcatcgcagtggactgtgtccctcggtgcagaaactaccagatttgagggacgaggtcaaggagatatgataggcccggaagttgctgtgccccatcagcagcttgacgcgtggtcacaggacgatttcactgacactgcgaactctcaggactaccgttaccaagaggttaggtgaagtggtttaaaccaaacggaactcttcatcttaaactacacgttgaaaatcaacccaataattctgtattaactgaattctgaacttttcaggaggtactgtgaggaagagcaggcaccagcagcagaatggggaatggagaggtgggcaggggttccagcttccctttgattttttgctgcagactcatcctttttaaatgagacttgttttcccctctctttgagtcaagtcaaatatgtagattgcctttggcaattcttcttctcaagcactgacactcattaccgtctgtgattgccatttcttcccaaggccagtctgaacctgaggttgctttatcctaaaagttttaacctcaggttccaaattcagtaaattttggaaacagtacagctatttctcatcaattctctatcatgttgaagtcaaatttggattttccaccaaattctgaatttgtagacatacttgtacgctcacttgccccagatgcctcctctgtcctcattcttctctcccacacaagcagtctttttctacagccagtaaggcagctctgtcgtggtagcagatggtcccattattctagggtcttactctttgtatgatgaaaagaatgtgttatgaatcggtgctgtcagccctgctgtcagaccttcttccacagcaaatgagatgtatgcccaaagacggtagaattaaagaagagtaaaatggctgttgaagcactttctgtcctggtattttgtttttgcttttgccacacagtagctcagaatttgaacaaatagccaaaagctggtggttgatgaattatgaactagttgtatcaacacaaagcaagagttggggaaagccatatttaacttggtgagctgtgggagaacctggtggcagaaggagaaccaactgccaaggggaaagagaaggggcctccagcagcgaaggggatacagtgagctaatgatgtcaaggaggagtttcaggttattctcgtcagctccacaaatgggtgctttgtggtctctgcccgcgttacctttcctctcaatgtacctttgtgtgaactgggcagtggaggtgcctgctgcagttaccatggagttcaggctctgggcagctcagtcaggcaaaacacacaaacagccatcagcctgtgtgggctcagggcacctctggacaaaggcttgtggggcataaccttctttaccacagagagcccttagctatgctgatcagaccgtaagcgtttatgagaaacttagtttcctcctgtggctgaggaggggccagctttttcttcttttgcctgctgttttctctcccaatctatgatatgatatgacctggtttggggctgtctttggtgtttagaatatttgttttctgtcccaggatatttcttataagaacctaacttcaagagtagtgtgcgagtactgatctgaatttaaattaaaattggcttatattaggcagtcacagacaggaaaaataagagctatgcaaagaaagggggatttaaagtagtaggttctatcatctcaattcatttttttccatgaaatcccttcttccaagattcattccctctctcagacatgtgctagcatgggtattatcattgagaaagcacagctacagcaaagccacctgaatagcaatttgtgattggaagcattcttgagggatccctaatctagagtaatttatttgtgtaaggatcccaaatgtgttgcacctttcatgatacatttcttctctgaagagggtacgtggggtgtgtgtatttaaatccatcctatgtattactgattgtcctgtgtagaaagatggcaattattctgtctctttctccaagtttgagccacatctcagccacattgttagacagtgtacagagaacctatctttcctttttttttttttaaaggacaggattttgctgtgttgcccaggctagacttgaactcctgggctcaagtaatccacctcagcctgagtagctgagactacagcccatcttatttctttaaatcattcatctcaggcagagaacttttccctcaaacattctttttagaattagttcagtcattcctaaaacatccaaatgctagtcttccaccatgaaaaatagattgtcactggaaagaacagtagcaatttccataaggatgtgccttcactcacacgggacaggcggtggttatagagtcgggcaaaaccagcagtagagtatgaccagccaagccaatctgcttaataaaaagatggaagacagtaaggaaggaaagtagccactaagagtctgagtctgactgggctacagaataaagggtatttatggacagaatgtcattacatgcctatgggaataccaatcatatttggaagatttgcagattttttttcagagaggaaagactcaccttcctgtttttggttctcagtaggttcgtgtgtgttcctagaatcacagctctgactccaaatgactcaatttctcaattagaaaaagtagaagctttctaagcaacttggaagaaaacagtcataagtaagcaatttgttgattttactacagaagcaacaactgaagaggcagtgtttttactttcagactccgggattcccattctgtagtctctctgcttttaaaaaccctccttttgcaatagatgcccaaacagatgatgtttattacttgttatttacgtggcctcagacagtgtatgtattctcgatataacttgtagagtgtgaaatataagtttaactaccaaataaggtctcccagggttagatgactgcgggaagcctttgatcccaacccccaaggctttgtatatttgatcatttgtgatctaaccctggaagaaaaagagctcagaaaccactatgaaaaaatttgttcagtgttttctgtgttcccgtaggttctggagtctgaggatgcaaagatgaataagataaattctcagaatgtagttataatctcttgttttctggtatatgccatctttctttaacttctctaaaatattgggtatttgtcaaataaccacttttaacagttaccattactgagggcttatacattggtgttataaaagtgacttgattcagaaatcaatccattcagtaaagtactccttctctaaatttgctgttatgtctataaggaacagtttgacctgcccttctcctcacctcctcacctgccttccaacattgaatttggaaggagacgtgaaaattggacatttggttttgcccttgggctggaaactatcatataatcataagtttgagcctagaagtgatccttgtgatcttctcacctctttaaattcccacaacacaagagattaaaaacagaggtttcagctcttcatagtgcgttgtgaaatggctggccagagtgtaccaacaaagctgtcatcgggctcacagctcagagacatctgcatgtgatcatctgcatagtcctctcctctaacgggaaacacctcagatttgcatataaaaaagcaccctggtgctgaaatgaacccctttcttgaacatcaaagctgtctcccacagccttgggcagcagggtgcctcttagtggatgtgctgggtccaccctgagccctgacatgtggtggcagcattgccagttggtctgtgtgtctgtgtagcagggacgatttcccagaaagcaattttccttttgaaatacgtaattgttgagactaggcagtttcaaagtcagctgcatatagtagcaagtacaggactgtcttgtttttggtgtccttggaggtgctggggtgagggtttcagtgggatcatttactctcacatgttgtctgccttctgcttctgtggacactgctttgtacttaattcagacagactgtgaatacaccttttttataaatacctttcaaattcttggtaagatataattttgatagctgattgcagattttctgtatttgtcagattaataaagactgcatgaatcca

SEQ ID NO: 2 - DNA, 6018 bp, synthetic construct
  misc_feature 1..6018: note = Synthetic
  source 1..6018: mol_type = other DNA
tggattcatgcagtctttattaatctgacaaatacagaaaatctgcaatcagctatcaaaattatatcttaccaagaatttgaaaggtatttataaaaaaggtgtattcacagtctgtctgaattaagtacaaagcagtgtccacagaagcagaaggcagacaacatgtgagagtaaatgatcccactgaaaccctcaccccagcacctccaaggacaccaaaaacaagacagtcctgtacttgctactatatgcagctgactttgaaactgcctagtctcaacaattacgtatttcaaaaggaaaattgctttctgggaaatcgtccctgctacacagacacacagaccaactggcaatgctgccaccacatgtcagggctcagggtggacccagcacatccactaagaggcaccctgctgcccaaggctgtgggagacagctttgatgttcaagaaaggggttcatttcagcaccagggtgcttttttatatgcaaatctgaggtgtttcccgttagaggagaggactatgcagatgatcacatgcagatgtctctgagctgtgagcccgatgacagctttgttggtacactctggccagccatttcacaacgcactatgaagagctgaaacctctgtttttaatctcttgtgttgtgggaatttaaagaggtgagaagatcacaaggatcacttctaggctcaaacttatgattatatgatagtttccagcccaagggcaaaaccaaatgtccaattttcacgtctccttccaaattcaatgttggaaggcaggtgaggaggtgaggagaagggcaggtcaaactgttccttatagacataacagcaaatttagagaaggagtactttactgaatggattgatttctgaatcaagtcacttttataacaccaatgtataagccctcagtaatggtaactgttaaaagtggttatttgacaaatacccaatattttagagaagttaaagaaagatggcatataccagaaaacaagagattataactacattctgagaatttatcttattcatctttgcatcctcagactccagaacctacgggaacacagaaaacactgaacaaattttttcatagtggtttctgagctctttttcttccagggttagatcacaaatgatcaaatatacaaagccttgggggttgggatcaaaggcttcccgcagtcatctaaccctgggagaccttatttggtagttaaacttatatttcacactctacaagttatatcgagaatacatacactgtctgaggccacgtaaataacaagtaataaacatcatctgtttgggcatctattgcaaaaggagggtttttaaaagcagagagactacagaatgggaatcccggagtctgaaagtaaaaacactgcctcttcagttgttgcttctgtagtaaaatcaacaaattgcttacttatgactgttttcttccaagttgcttagaaagcttctactttttctaattgagaaattgagtcatttggagtcagagctgtgattctaggaacacacacgaacctactgagaaccaaaaacaggaaggtgagtctttcctctctgaaaaaaaatctgcaaatcttccaaatatgattggtattcccataggcatgtaatgacattctgtccataaataccctttattctgtagcccagtcagactcagactcttagtggctactttccttccttactgtcttccatctttttattaagcagattggcttggctggtcatactctactgctggttttgcccgactctataaccaccgcctgtcccgtgtgagtgaaggcacatccttatggaaattgctactgttctttccagtgacaatctatttttcatggtggaagactagcatttggatgttttaggaatgactgaactaattctaaaaagaatgtttgagggaaaagttctctgcctgagatgaatgatttaaagaaataagatgggctgtagtctcagctactcaggctgaggtggattacttgagcccaggagttcaagtctagcctgggcaacacagcaaaatcctgtcctttaaaaaaaaaaaaaggaaagataggttctctgtacactgtctaacaatgtggctgagatgtggctcaaacttggagaaagagacagaataattgccatctttctacacaggacaatcagtaatacataggatggatttaaatacacacaccccacgtaccctcttcagagaagaaatgtatcatgaaaggtgcaacacatttgggatccttacacaaataaattactctagattagggatccctcaagaatgcttccaatcacaaattgctattcaggtggctttgctgtagctgtgctttctcaatgataatacccatgctagcacatgtctgagagagggaatgaatcttggaagaagggatttcatggaaaaaaatgaattgagatgatagaacctactactttaaatccccctttctttgcatagctcttatttttcctgtctgtgactgcctaatataagccaattttaatttaaattcagatcagtactcgcacactactcttgaagttaggttcttataagaaatatcctgggacagaaaacaaatattctaaacaccaaagacagccccaaaccaggtcatatcatatcatagattgggagagaaaacagcaggcaaaagaagaaaaagctggcccctcctcagccacaggaggaaactaagtttctcataaacgcttacggtctgatcagcatagctaagggctctctgtggtaaagaaggttatgccccacaagcctttgtccagaggtgccctgagcccacacaggctgatggctgtttgtgtgttttgcctgactgagctgcccagagcctgaactccatggtaactgcagcaggcacctccactgcccagttcacacaaaggtacattgagaggaaaggtaacgcgggcagagaccacaaagcacccatttgtggagctgacgagaataacctgaaactcctccttgacatcattagctcactgtatccccttcgctgctggaggccccttctctttccccttggcagttggttctccttctgccaccaggttctcccacagctcaccaagttaaatatggctttccccaactcttgctttgtgttgatacaactagttcataattcatcaaccaccagcttttggctatttgttcaaattctgagctactgtgtggcaaaagcaaaaacaaaataccaggacagaaagtgcttcaacagccattttactcttctttaattctaccgtctttgggcatacatctcatttgctgtggaagaaggtctgacagcagggctgacagcaccgattcataacacattcttttcatcatacaaagagtaagaccctagaataatgggaccatctgctaccacgacagagctgccttactggctgtagaaaaagactgcttgtgtgggagagaagaatgaggacagaggaggcatctggggcaagtgagcgtacaagtatgtctacaaattcagaatttggtggaaaatccaaatttgacttcaacatgatagagaattgatgagaaatagctgtactgtttccaaaatttactgaatttggaacctgaggttaaaacttttaggataaagcaacctcaggttcagactggccttgggaagaaatggcaatcacagacggtaatgagtgtcagtgcttgagaagaagaattgccaaaggcaatctacatatttgacttgactcaaagagaggggaaaacaagtctcatttaaaaaggatgagtctgcagcaaaaaatcaaagggaagctggaacccctgcccacctctccattccccattctgctgctggtgcctgctcttcctcacagtacctcctgaaaagttcagaattcagttaatacagaattattgggttgattttcaacgtgtagtttaagatgaagagttccgtttggtttaaaccacttcacctaacctcttggtaacggtagtcctgagagttcgcagtgtcagtgaaatcgtcctgtgaccacgcgtcaagctgctgatggggcacagcaacttccgggcctatcatatctccttgacctcgtccctcaaatctggtagtttctgcaccgagggacacagtccactgcgatgaagtatgttcaaaatcgttttctataggcacctccttccaaagtccaatagtgcaaggtggtcaggaagacttggaaggaagctgcaaaagtccagccgggaatcttgactttgttagatgtggacacaggaaaatcacctttgtcctccccagattttgttatagtcaaagaagaaacatccatgggattctaaccgcaaatatgctagatataaaattgatggaatgctaattggtccataaaaggctgtacaagataatctgtggcaaagtagaaaacaagcccaaaggtgatggagattggaagagctggcaatgctttcttgaaaatggcaaggagtaataatgtaaggcacaaaccaattaatatggctacgaaacaggctatggttgtgttccagtctccactggctgttgctgaggctttaccaaccagaacactgtagaaaatgaaatctcccaatccaagttttactcccctttcctctgggtcttcaccagcgaggatactgctggaaagttcctggacagcagctcgtgactcaggtgtagagcgatgaggccctagatgactgtccctctgggcttcccattcctcactgaacccgccatcatcattctctgcaacagtgtcttgtgactccctttctgtgctttctgcattatacttggaatttttggatactctcctttgagcttccgggtctccttctgccatattcaccaaccacaccattgttgaggagtaaatgagagctggaaaaagcgtttcatttctctcctgagctgtttcaaccagcatacgaagtggacctttcggacacaaaacagccactaaatcatatactgaaatcacagccaagatgagccacgcagtccattcagggaggtacttgataaacaccagggccatgagggcactaatcataatgagatatgcctgctggagtcgaagtggacctttccagtgaatggaaatcattcccaccacaccaaaattccagatcaggagtgcaacagtaatgtagtccacagcaacgttataggttttaaacacttcccccaagtaaatgaatgaaaaaaagaacagcaacaatagagatgatataataagccaggcatggatgaccttatagcacctgtatttatacagaaccaccaggaggatagtcatgacaacaatgacactgatcatgatggcagcattcagaattgagtgcagggctctctggcccacagtctcggtatcttctgtgaatggggtatagattagctgcccatccttccgggtataaaagctgactgacttaatggtagccacgaccaccaccatgcagagagtcacagggacaaagagcatgatcacatgcttggcgccatatttcaatgtcagctcctcatcttcttcctcatcttgctccaccacctgccgggagttaccctggggtcgtccattagataatggctcagggtggccaaggctccgtctgtcgttgtgctcctgccgttctctattgtcattctggctacgtacagtattgctcaggtggttgtcctcagacatctgtgcattctggaagtaggacaacggtgcaggtaactctgtcattggagcaactgtatagaaatactgtttcacagaaaacaaagcctcttgaggttctttctttcatgtgttctcctccaggccaagctgtctaaggaccgcaaaggctgttgtcacttgcaggctcccagattaggtatacgcttccccgccgccccgctgccgccgcggctcgtagctcaggttccttccagaccagccgctgttttgtttcc

SEQ ID NO: 3 - protein, 467 aa, Homo sapiens
MTELPAPLSYFQNAQMSEDNHLSNTVRSQNDNRERQEHNDRRSLGHPEPLSNGRPQGNSRQVVEQDEEEDEELTLKYGAKHVIMLFVPVTLCMVVVVATIKSVSFYTRKDGQLIYTPFTEDTETVGQRALHSILNAAIMISVIVVMTILLVVLYKYRCYKVIHAWLIISSLLLLFFFSFIYLGEVFKTYNVAVDYITVALLIWNFGVVGMISIHWKGPLRLQQAYLIMISALMALVFIKYLPEWTAWLILAVISVYDLVAVLCPKGPLRMLVETAQERNETLFPALIYSSTMVWLVNMAEGDPEAQRRVSKNSKYNAESTERESQDTVAENDDGGFSEEWEAQRDSHLGPHRSTPESRAAVQELSSSILAGEDPEERGVKLGLGDFIFYSVLVGKASATASGDWNTTIACFVAILIGLCLTLLLLAIFKKALPALPISITFGLVFYFATDYLVQPFMDQLAFHQFYI

SEQ ID NO: 4 - DNA, 6006 bp, Homo sapiens
  source 1..6006: mol_type = other DNA
ggaaacaaaacagcggctggtctggaaggaacctgagctacgagccgcggcggcagcggggcggcggggaagcgtatacctaatctgggagcctgcaagtgacaacagcctttgcggtccttagacagcttggcctggaggagaacacatgaaagaaagaacctcaagaggctttgttttctgtgaaacagtatttctatacagttgctccaatgacagagttacctgcaccgttgtcctacttccagaatgcacagatgtctgaggacaaccacctgagcaatactaatgacaatagagaacggcaggagcacaacgacagacggagccttggccaccctgagccattatctaatggacgaccccagggtaactcccggcaggtggtggagcaagatgaggaagaagatgaggagctgacattgaaatatggcgccaagcatgtgatcatgctctttgtccctgtgactctctgcatggtggtggtcgtggctaccattaagtcagtcagcttttatacccggaaggatgggcagctaatctataccccattcacagaagataccgagactgtgggccagagagccctgcactcaattctgaatgctgccatcatgatcagtgtcattgttgtcatgactatcctcctggtggttctgtataaatacaggtgctataaggtcatccatgcctggcttattatatcatctctattgttgctgttctttttttcattcatttacttgggggaagtgtttaaaacctataacgttgctgtggactacattactgttgcactcctgatctggaattttggtgtggtgggaatgatttccattcactggaaaggtccacttcgactccagcaggcatatctcattatgattagtgccctcatggccctggtgtttatcaagtacctccctgaatggactgcgtggctcatcttggctgtgatttcagtatatgatttagtggctgttttgtgtccgaaaggtccacttcgtatgctggttgaaacagctcaggagagaaatgaaacgctttttccagctctcatttactcctcaacaatggtgtggttggtgaatatggcagaaggagacccggaagctcaaaggagagtatccaaaaattccaagtataatgcagaaagcacagaaagggagtcacaagacactgttgcagagaatgatgatggcgggttcagtgaggaatgggaagcccagagggacagtcatctagggcctcatcgctctacacctgagtcacgagctgctgtccaggaactttccagcagtatcctcgctggtgaagacccagaggaaaggggagtaaaacttggattgggagatttcattttctacagtgttctggttggtaaagcctcagcaacagccagtggagactggaacacaaccatagcctgtttcgtagccatattaattggtttgtgccttacattattactccttgccattttcaagaaagcattgccagctcttccaatctccatcacctttgggcttgttttctactttgccacagattatcttgtacagccttttatggaccaattagcattccatcaattttatatctagcatatttgcggttagaatcccatggatgtttcttctttgactataacaaaatctggggaggacaaaggtgattttcctgtgtccacatctaacaaagtcaagattcccggctggacttttgcagcttccttccaagtcttcctgaccaccttgcactattggactttggaaggaggtgcctatagaaaacgattttgaacatacttcatcgcagtggactgtgtccctcggtgcagaaactaccagatttgagggacgaggtcaaggagatatgataggcccggaagttgctgtgccccatcagcagcttgacgcgtggtcacaggacgatttcactgacactgcgaactctcaggactaccgttaccaagaggttaggtgaagtggtttaaaccaaacggaactcttcatcttaaactacacgttgaaaatcaacccaataattctgtattaactgaattctgaacttttcaggaggtactgtgaggaagagcaggcaccagcagcagaatggggaatggagaggtgggcaggggttccagcttccctttgattttttgctgcagactcatcctttttaaatgagacttgttttcccctctctttgagtcaagtcaaatatgtagattgcctttggcaattcttcttctcaagcactgacactcattaccgtctgtgattgccatttcttcccaaggccagtctgaacctgaggttgctttatcctaaaagttttaacctcaggttccaaattcagtaaattttggaaacagtacagctatttctcatcaattctctatcatgttgaagtcaaatttggattttccaccaaattctgaatttgtagacatacttgtacgctcacttgccccagatgcctcctctgtcctcattcttctctcccacacaagcagtctttttctacagccagtaaggcagctctgtcgtggtagcagatggtcccattattctagggtcttactctttgtatgatgaaaagaatgtgttatgaatcggtgctgtcagccctgctgtcagaccttcttccacagcaaatgagatgtatgcccaaagacggtagaattaaagaagagtaaaatggctgttgaagcactttctgtcctggtattttgtttttgcttttgccacacagtagctcagaatttgaacaaatagccaaaagctggtggttgatgaattatgaactagttgtatcaacacaaagcaagagttggggaaagccatatttaacttggtgagctgtgggagaacctggtggcagaaggagaaccaactgccaaggggaaagagaaggggcctccagcagcgaaggggatacagtgagctaatgatgtcaaggaggagtttcaggttattctcgtcagctccacaaatgggtgctttgtggtctctgcccgcgttacctttcctctcaatgtacctttgtgtgaactgggcagtggaggtgcctgctgcagttaccatggagttcaggctctgggcagctcagtcaggcaaaacacacaaacagccatcagcctgtgtgggctcagggcacctctggacaaaggcttgtggggcataaccttctttaccacagagagcccttagctatgctgatcagaccgtaagcgtttatgagaaacttagtttcctcctgtggctgaggaggggccagctttttcttcttttgcctgctgttttctctcccaatctatgatatgatatgacctggtttggggctgtctttggtgtttagaatatttgttttctgtcccaggatatttcttataagaacctaacttcaagagtagtgtgcgagtactgatctgaatttaaattaaaattggcttatattaggcagtcacagacaggaaaaataagagctatgcaaagaaagggggatttaaagtagtaggttctatcatctcaattcatttttttccatgaaatcccttcttccaagattcattccctctctcagacatgtgctagcatgggtattatcattgagaaagcacagctacagcaaagccacctgaatagcaatttgtgattggaagcattcttgagggatccctaatctagagtaatttatttgtgtaaggatcccaaatgtgttgcacctttcatgatacatttcttctctgaagagggtacgtggggtgtgtgtatttaaatccatcctatgtattactgattgtcctgtgtagaaagatggcaattattctgtctctttctccaagtttgagccacatctcagccacattgttagacagtgtacagagaacctatctttcctttttttttttttaaaggacaggattttgctgtgttgcccaggctagacttgaactcctgggctcaagtaatccacctcagcctgagtagctgagactacagcccatcttatttctttaaatcattcatctcaggcagagaacttttccctcaaacattctttttagaattagttcagtcattcctaaaacatccaaatgctagtcttccaccatgaaaaatagattgtcactggaaagaacagtagcaatttccataaggatgtgccttcactcacacgggacaggcggtggttatagagtcgggcaaaaccagcagtagagtatgaccagccaagccaatctgcttaataaaaagatggaagacagtaaggaaggaaagtagccactaagagtctgagtctgactgggctacagaataaagggtatttatggacagaatgtcattacatgcctatgggaataccaatcatatttggaagatttgcagattttttttcagagaggaaagactcaccttcctgtttttggttctcagtaggttcgtgtgtgttcctagaatcacagctctgactccaaatgactcaatttctcaattagaaaaagtagaagctttctaagcaacttggaagaaaacagtcataagtaagcaatttgttgattttactacagaagcaacaactgaagaggcagtgtttttactttcagactccgggattcccattctgtagtctctctgcttttaaaaaccctccttttgcaatagatgcccaaacagatgatgtttattacttgttatttacgtggcctcagacagtgtatgtattctcgatataacttgtagagtgtgaaatataagtttaactaccaaataaggtctcccagggttagatgactgcgggaagcctttgatcccaacccccaaggctttgtatatttgatcatttgtgatctaaccctggaagaaaaagagctcagaaaccactatgaaaaaatttgttcagtgttttctgtgttcccgtaggttctggagtctgaggatgcaaagatgaataagataaattctcagaatgtagttataatctcttgttttctggtatatgccatctttctttaacttctctaaaatattgggtatttgtcaaataaccacttttaacagttaccattactgagggcttatacattggtgttataaaagtgacttgattcagaaatcaatccattcagtaaagtactccttctctaaatttgctgttatgtctataaggaacagtttgacctgcccttctcctcacctcctcacctgccttccaacattgaatttggaaggagacgtgaaaattggacatttggttttgcccttgggctggaaactatcatataatcataagtttgagcctagaagtgatccttgtgatcttctcacctctttaaattcccacaacacaagagattaaaaacagaggtttcagctcttcatagtgcgttgtgaaatggctggccagagtgtaccaacaaagctgtcatcgggctcacagctcagagacatctgcatgtgatcatctgcatagtcctctcctctaacgggaaacacctcagatttgcatataaaaaagcaccctggtgctgaaatgaacccctttcttgaacatcaaagctgtctcccacagccttgggcagcagggtgcctcttagtggatgtgctgggtccaccctgagccctgacatgtggtggcagcattgccagttggtctgtgtgtctgtgtagcagggacgatttcccagaaagcaattttccttttgaaatacgtaattgttgagactaggcagtttcaaagtcagctgcatatagtagcaagtacaggactgtcttgtttttggtgtccttggaggtgctggggtgagggtttcagtgggatcatttactctcacatgttgtctgccttctgcttctgtggacactgctttgtacttaattcagacagactgtgaatacaccttttttataaatacctttcaaattcttggtaagatataattttgatagctgattgcagattttctgtatttgtcagattaataaagactgcatgaatcca

SEQ ID NO: 5 - DNA, 6006 bp, synthetic construct
  misc_feature 1..6006: note = Synthetic
  source 1..6006: mol_type = other DNA
tggattcatgcagtctttattaatctgacaaatacagaaaatctgcaatcagctatcaaaattatatcttaccaagaatttgaaaggtatttataaaaaaggtgtattcacagtctgtctgaattaagtacaaagcagtgtccacagaagcagaaggcagacaacatgtgagagtaaatgatcccactgaaaccctcaccccagcacctccaaggacaccaaaaacaagacagtcctgtacttgctactatatgcagctgactttgaaactgcctagtctcaacaattacgtatttcaaaaggaaaattgctttctgggaaatcgtccctgctacacagacacacagaccaactggcaatgctgccaccacatgtcagggctcagggtggacccagcacatccactaagaggcaccctgctgcccaaggctgtgggagacagctttgatgttcaagaaaggggttcatttcagcaccagggtgcttttttatatgcaaatctgaggtgtttcccgttagaggagaggactatgcagatgatcacatgcagatgtctctgagctgtgagcccgatgacagctttgttggtacactctggccagccatttcacaacgcactatgaagagctgaaacctctgtttttaatctcttgtgttgtgggaatttaaagaggtgagaagatcacaaggatcacttctaggctcaaacttatgattatatgatagtttccagcccaagggcaaaaccaaatgtccaattttcacgtctccttccaaattcaatgttggaaggcaggtgaggaggtgaggagaagggcaggtcaaactgttccttatagacataacagcaaatttagagaaggagtactttactgaatggattgatttctgaatcaagtcacttttataacaccaatgtataagccctcagtaatggtaactgttaaaagtggttatttgacaaatacccaatattttagagaagttaaagaaagatggcatataccagaaaacaagagattataactacattctgagaatttatcttattcatctttgcatcctcagactccagaacctacgggaacacagaaaacactgaacaaattttttcatagtggtttctgagctctttttcttccagggttagatcacaaatgatcaaatatacaaagccttgggggttgggatcaaaggcttcccgcagtcatctaaccctgggagaccttatttggtagttaaacttatatttcacactctacaagttatatcgagaatacatacactgtctgaggccacgtaaataacaagtaataaacatcatctgtttgggcatctattgcaaaaggagggtttttaaaagcagagagactacagaatgggaatcccggagtctgaaagtaaaaacactgcctcttcagttgttgcttctgtagtaaaatcaacaaattgcttacttatgactgttttcttccaagttgcttagaaagcttctactttttctaattgagaaattgagtcatttggagtcagagctgtgattctaggaacacacacgaacctactgagaaccaaaaacaggaaggtgagtctttcctctctgaaaaaaaatctgcaaatcttccaaatatgattggtattcccataggcatgtaatgacattctgtccataaataccctttattctgtagcccagtcagactcagactcttagtggctactttccttccttactgtcttccatctttttattaagcagattggcttggctggtcatactctactgctggttttgcccgactctataaccaccgcctgtcccgtgtgagtgaaggcacatccttatggaaattgctactgttctttccagtgacaatctatttttcatggtggaagactagcatttggatgttttaggaatgactgaactaattctaaaaagaatgtttgagggaaaagttctctgcctgagatgaatgatttaaagaaataagatgggctgtagtctcagctactcaggctgaggtggattacttgagcccaggagttcaagtctagcctgggcaacacagcaaaatcctgtcctttaaaaaaaaaaaaaggaaagataggttctctgtacactgtctaacaatgtggctgagatgtggctcaaacttggagaaagagacagaataattgccatctttctacacaggacaatcagtaatacataggatggatttaaatacacacaccccacgtaccctcttcagagaagaaatgtatcatgaaaggtgcaacacatttgggatccttacacaaataaattactctagattagggatccctcaagaatgcttccaatcacaaattgctattcaggtggctttgctgtagctgtgctttctcaatgataatacccatgctagcacatgtctgagagagggaatgaatcttggaagaagggatttcatggaaaaaaatgaattgagatgatagaacctactactttaaatccccctttctttgcatagctcttatttttcctgtctgtgactgcctaatataagccaattttaatttaaattcagatcagtactcgcacactactcttgaagttaggttcttataagaaatatcctgggacagaaaacaaatattctaaacaccaaagacagccccaaaccaggtcatatcatatcatagattgggagagaaaacagcaggcaaaagaagaaaaagctggcccctcctcagccacaggaggaaactaagtttctcataaacgcttacggtctgatcagcatagctaagggctctctgtggtaaagaaggttatgccccacaagcctttgtccagaggtgccctgagcccacacaggctgatggctgtttgtgtgttttgcctgactgagctgcccagagcctgaactccatggtaactgcagcaggcacctccactgcccagttcacacaaaggtacattgagaggaaaggtaacgcgggcagagaccacaaagcacccatttgtggagctgacgagaataacctgaaactcctccttgacatcattagctcactgtatccccttcgctgctggaggccccttctctttccccttggcagttggttctccttctgccaccaggttctcccacagctcaccaagttaaatatggctttccccaactcttgctttgtgttgatacaactagttcataattcatcaaccaccagcttttggctatttgttcaaattctgagctactgtgtggcaaaagcaaaaacaaaataccaggacagaaagtgcttcaacagccattttactcttctttaattctaccgtctttgggcatacatctcatttgctgtggaagaaggtctgacagcagggctgacagcaccgattcataacacattcttttcatcatacaaagagtaagaccctagaataatgggaccatctgctaccacgacagagctgccttactggctgtagaaaaagactgcttgtgtgggagagaagaatgaggacagaggaggcatctggggcaagtgagcgtacaagtatgtctacaaattcagaatttggtggaaaatccaaatttgacttcaacatgatagagaattgatgagaaatagctgtactgtttccaaaatttactgaatttggaacctgaggttaaaacttttaggataaagcaacctcaggttcagactggccttgggaagaaatggcaatcacagacggtaatgagtgtcagtgcttgagaagaagaattgccaaaggcaatctacatatttgacttgactcaaagagaggggaaaacaagtctcatttaaaaaggatgagtctgcagcaaaaaatcaaagggaagctggaacccctgcccacctctccattccccattctgctgctggtgcctgctcttcctcacagtacctcctgaaaagttcagaattcagttaatacagaattattgggttgattttcaacgtgtagtttaagatgaagagttccgtttggtttaaaccacttcacctaacctcttggtaacggtagtcctgagagttcgcagtgtcagtgaaatcgtcctgtgaccacgcgtcaagctgctgatggggcacagcaacttccgggcctatcatatctccttgacctcgtccctcaaatctggtagtttctgcaccgagggacacagtccactgcgatgaagtatgttcaaaatcgttttctataggcacctccttccaaagtccaatagtgcaaggtggtcaggaagacttggaaggaagctgcaaaagtccagccgggaatcttgactttgttagatgtggacacaggaaaatcacctttgtcctccccagattttgttatagtcaaagaagaaacatccatgggattctaaccgcaaatatgctagatataaaattgatggaatgctaattggtccataaaaggctgtacaagataatctgtggcaaagtagaaaacaagcccaaaggtgatggagattggaagagctggcaatgctttcttgaaaatggcaaggagtaataatgtaaggcacaaaccaattaatatggctacgaaacaggctatggttgtgttccagtctccactggctgttgctgaggctttaccaaccagaacactgtagaaaatgaaatctcccaatccaagttttactcccctttcctctgggtcttcaccagcgaggatactgctggaaagttcctggacagcagctcgtgactcaggtgtagagcgatgaggccctagatgactgtccctctgggcttcccattcctcactgaacccgccatcatcattctctgcaacagtgtcttgtgactccctttctgtgctttctgcattatacttggaatttttggatactctcctttgagcttccgggtctccttctgccatattcaccaaccacaccattgttgaggagtaaatgagagctggaaaaagcgtttcatttctctcctgagctgtttcaaccagcatacgaagtggacctttcggacacaaaacagccactaaatcatatactgaaatcacagccaagatgagccacgcagtccattcagggaggtacttgataaacaccagggccatgagggcactaatcataatgagatatgcctgctggagtcgaagtggacctttccagtgaatggaaatcattcccaccacaccaaaattccagatcaggagtgcaacagtaatgtagtccacagcaacgttataggttttaaacacttcccccaagtaaatgaatgaaaaaaagaacagcaacaatagagatgatataataagccaggcatggatgaccttatagcacctgtatttatacagaaccaccaggaggatagtcatgacaacaatgacactgatcatgatggcagcattcagaattgagtgcagggctctctggcccacagtctcggtatcttctgtgaatggggtatagattagctgcccatccttccgggtataaaagctgactgacttaatggtagccacgaccaccaccatgcagagagtcacagggacaaagagcatgatcacatgcttggcgccatatttcaatgtcagctcctcatcttcttcctcatcttgctccaccacctgccgggagttaccctggggtcgtccattagataatggctcagggtggccaaggctccgtctgtcgttgtgctcctgccgttctctattgtcattagtattgctcaggtggttgtcctcagacatctgtgcattctggaagtaggacaacggtgcaggtaactctgtcattggagcaactgtatagaaatactgtttcacagaaaacaaagcctcttgaggttctttctttcatgtgttctcctccaggccaagctgtctaaggaccgcaaaggctgttgtcacttgcaggctcccagattaggtatacgcttccccgccgccccgctgccgccgcggctcgtagctcaggttccttccagaccagccgctgttttgtttcc

SEQ ID NO: 6 - protein, 463 aa, Homo sapiens
MTELPAPLSYFQNAQMSEDNHLSNTNDNRERQEHNDRRSLGHPEPLSNGRPQGNSRQVVEQDEEEDEELTLKYGAKHVIMLFVPVTLCMVVVVATIKSVSFYTRKDGQLIYTPFTEDTETVGQRALHSILNAAIMISVIVVMTILLVVLYKYRCYKVIHAWLIISSLLLLFFFSFIYLGEVFKTYNVAVDYITVALLIWNFGVVGMISIHWKGPLRLQQAYLIMISALMALVFIKYLPEWTAWLILAVISVYDLVAVLCPKGPLRMLVETAQERNETLFPALIYSSTMVWLVNMAEGDPEAQRRVSKNSKYNAESTERESQDTVAENDDGGFSEEWEAQRDSHLGPHRSTPESRAAVQELSSSILAGEDPEERGVKLGLGDFIFYSVLVGKASATASGDWNTTIACFVAILIGLCLTLLLLAIFKKALPALPISITFGLVFYFATDYLVQPFMDQLAFHQFYI

SEQ ID NO: 7 - DNA, 3358 bp, Homo sapiens
  source 1..3358: mol_type = other DNA
gtcagtttcctcggcagcggtaggcgagagcacgcggaggagcgtgcgcgggggccccgggagacggcggcggtggcggcgcgggcagagcaaggacgcggcggatcccactcgcacagcagcgcactcggtgccccgcgcagggtcgcgatgctgcccggtttggcactgctcctgctggccgcctggacggctcgggcgctggaggtacccactgatggtaatgctggcctgctggctgaaccccagattgccatgttctgtggcagactgaacatgcacatgaatgtccagaatgggaagtgggattcagatccatcagggaccaaaacctgcattgataccaaggaaggcatcctgcagtattgccaagaagtctaccctgaactgcagatcaccaatgtggtagaagccaaccaaccagtgaccatccagaactggtgcaagcggggccgcaagcagtgcaagacccatccccactttgtgattccctaccgctgcttagttggtgagtttgtaagtgatgcccttctcgttcctgacaagtgcaaattcttacaccaggagaggatggatgtttgcgaaactcatcttcactggcacaccgtcgccaaagagacatgcagtgagaagagtaccaacttgcatgactacggcatgttgctgccctgcggaattgacaagttccgaggggtagagtttgtgtgttgcccactggctgaagaaagtgacaatgtggattctgctgatgcggaggaggatgactcggatgtctggtggggcggagcagacacagactatgcagatgggagtgaagacaaagtagtagaagtagcagaggaggaagaagtggctgaggtggaagaagaagaagccgatgatgacgaggacgatgaggatggtgatgaggtagaggaagaggctgaggaaccctacgaagaagccacagagagaaccaccagcattgccaccaccaccaccaccaccacagagtctgtggaagaggtggttcgagttcctacaacagcagccagtacccctgatgccgttgacaagtatctcgagacacctggggatgagaatgaacatgcccatttccagaaagccaaagagaggcttgaggccaagcaccgagagagaatgtcccaggtcatgagagaatgggaagaggcagaacgtcaagcaaagaacttgcctaaagctgataagaaggcagttatccagcatttccaggagaaagtggaatctttggaacaggaagcagccaacgagagacagcagctggtggagacacacatggccagagtggaagccatgctcaatgaccgccgccgcctggccctggagaactacatcaccgctctgcaggctgttcctcctcggcctcgtcacgtgttcaatatgctaaagaagtatgtccgcgcagaacagaaggacagacagcacaccctaaagcatttcgagcatgtgcgcatggtggatcccaagaaagccgctcagatccggtcccaggttatgacacacctccgtgtgatttatgagcgcatgaatcagtctctctccctgctctacaacgtgcctgcagtggccgaggagattcaggatgaagttgatgagctgcttcagaaagagcaaaactattcagatgacgtcttggccaacatgattagtgaaccaaggatcagttacggaaacgatgctctcatgccatctttgaccgaaacgaaaaccaccgtggagctccttcccgtgaatggagagttcagcctggacgatctccagccgtggcattcttttggggctgactctgtgccagccaacacagaaaacgaagttgagcctgttgatgcccgccctgctgccgaccgaggactgaccactcgaccaggttctgggttgacaaatatcaagacggaggagatctctgaagtgaagatggatgcagaattccgacatgactcaggatatgaagttcatcatcaaaaattggtgttctttgcagaagatgtgggttcaaacaaaggtgcaatcattggactcatggtgggcggtgttgtcatagcgacagtgatcgtcatcaccttggtgatgctgaagaagaaacagtacacatccattcatcatggtgtggtggaggttgacgccgctgtcaccccagaggagcgccacctgtccaagatgcagcagaacggctacgaaaatccaacctacaagttctttgagcagatgcagaactagacccccgccacagcagcctctgaagttggacagcaaaaccattgcttcactacccatcggtgtccatttatagaataatgtgggaagaaacaaacccgttttatgatttactcattatcgccttttgacagctgtgctgtaacacaagtagatgcctgaacttgaattaatccacacatcagtaatgtattctatctctctttacattttggtctctatactacattattaatgggttttgtgtactgtaaagaatttagctgtatcaaactagtgcatgaatagattctctcctgattatttatcacatagccccttagccagttgtatattattcttgtggtttgtgacccaattaagtcctactttacatatgctttaagaatcgatgggggatgcttcatgtgaacgtgggagttcagctgcttctcttgcctaagtattcctttcctgatcactatgcattttaaagttaaacatttttaagtatttcagatgctttagagagattttttttccatgactgcattttactgtacagattgctgcttctgctatatttgtgatataggaattaagaggatacacacgtttgtttcttcgtgcctgttttatgtgcacacattaggcattgagacttcaagcttttctttttttgtccacgtatctttgggtctttgataaagaaaagaatccctgttcattgtaagcacttttacggggcgggtggggaggggtgctctgctggtcttcaattaccaagaattctccaaaacaattttctgcaggatgattgtacagaatcattgcttatgacatgatcgctttctacactgtattacataaataaattaaataaaataaccccgggcaagacttttctttgaaggatgactacagacattaaataatcgaagtaattttgggtggggagaagaggcagattcaattttctttaaccagtctgaagtttcatttatgatacaaaagaagatgaaaatggaagtggcaatataaggggatgaggaaggcatgcctggacaaacccttcttttaagatgtgtcttcaatttgtataaaatggtgttttcatgtaaataaatacattcttggaggagca

SEQ ID NO: 8 - DNA, 3358 bp, synthetic construct
  misc_feature 1..3358: note = Synthetic
  source 1..3358: mol_type = other DNA
tgctcctccaagaatgtatttatttacatgaaaacaccattttatacaaattgaagacacatcttaaaagaagggtttgtccaggcatgccttcctcatccccttatattgccacttccattttcatcttcttttgtatcataaatgaaacttcagactggttaaagaaaattgaatctgcctcttctccccacccaaaattacttcgattatttaatgtctgtagtcatccttcaaagaaaagtcttgcccggggttattttatttaatttatttatgtaatacagtgtagaaagcgatcatgtcataagcaatgattctgtacaatcatcctgcagaaaattgttttggagaattcttggtaattgaagaccagcagagcacccctccccacccgccccgtaaaagtgcttacaatgaacagggattcttttctttatcaaagacccaaagatacgtggacaaaaaaagaaaagcttgaagtctcaatgcctaatgtgtgcacataaaacaggcacgaagaaacaaacgtgtgtatcctcttaattcctatatcacaaatatagcagaagcagcaatctgtacagtaaaatgcagtcatggaaaaaaaatctctctaaagcatctgaaatacttaaaaatgtttaactttaaaatgcatagtgatcaggaaaggaatacttaggcaagagaagcagctgaactcccacgttcacatgaagcatcccccatcgattcttaaagcatatgtaaagtaggacttaattgggtcacaaaccacaagaataatatacaactggctaaggggctatgtgataaataatcaggagagaatctattcatgcactagtttgatacagctaaattctttacagtacacaaaacccattaataatgtagtatagagaccaaaatgtaaagagagatagaatacattactgatgtgtggattaattcaagttcaggcatctacttgtgttacagcacagctgtcaaaaggcgataatgagtaaatcataaaacgggtttgtttcttcccacattattctataaatggacaccgatgggtagtgaagcaatggttttgctgtccaacttcagaggctgctgtggcgggggtctagttctgcatctgctcaaagaacttgtaggttggattttcgtagccgttctgctgcatcttggacaggtggcgctcctctggggtgacagcggcgtcaacctccaccacaccatgatgaatggatgtgtactgtttcttcttcagcatcaccaaggtgatgacgatcactgtcgctatgacaacaccgcccaccatgagtccaatgattgcacctttgtttgaacccacatcttctgcaaagaacaccaatttttgatgatgaacttcatatcctgagtcatgtcggaattctgcatccatcttcacttcagagatctcctccgtcttgatatttgtcaacccagaacctggtcgagtggtcagtcctcggtcggcagcagggcgggcatcaacaggctcaacttcgttttctgtgttggctggcacagagtcagccccaaaagaatgccacggctggagatcgtccaggctgaactctccattcacgggaaggagctccacggtggttttcgtttcggtcaaagatggcatgagagcatcgtttccgtaactgatccttggttcactaatcatgttggccaagacgtcatctgaatagttttgctctttctgaagcagctcatcaacttcatcctgaatctcctcggccactgcaggcacgttgtagagcagggagagagactgattcatgcgctcataaatcacacggaggtgtgtcataacctgggaccggatctgagcggctttcttgggatccaccatgcgcacatgctcgaaatgctttagggtgtgctgtctgtccttctgttctgcgcggacatacttctttagcatattgaacacgtgacgaggccgaggaggaacagcctgcagagcggtgatgtagttctccagggccaggcggcggcggtcattgagcatggcttccactctggccatgtgtgtctccaccagctgctgtctctcgttggctgcttcctgttccaaagattccactttctcctggaaatgctggataactgccttcttatcagctttaggcaagttctttgcttgacgttctgcctcttcccattctctcatgacctgggacattctctctcggtgcttggcctcaagcctctctttggctttctggaaatgggcatgttcattctcatccccaggtgtctcgagatacttgtcaacggcatcaggggtactggctgctgttgtaggaactcgaaccacctcttccacagactctgtggtggtggtggtggtggtggcaatgctggtggttctctctgtggcttcttcgtagggttcctcagcctcttcctctacctcatcaccatcctcatcgtcctcgtcatcatcggcttcttcttcttccacctcagccacttcttcctcctctgctacttctactactttgtcttcactcccatctgcatagtctgtgtctgctccgccccaccagacatccgagtcatcctcctccgcatcagcagaatccacattgtcactttcttcagccagtgggcaacacacaaactctacccctcggaacttgtcaattccgcagggcagcaacatgccgtagtcatgcaagttggtactcttctcactgcatgtctctttggcgacggtgtgccagtgaagatgagtttcgcaaacatccatcctctcctggtgtaagaatttgcacttgtcaggaacgagaagggcatcacttacaaactcaccaactaagcagcggtagggaatcacaaagtggggatgggtcttgcactgcttgcggccccgcttgcaccagttctggatggtcactggttggttggcttctaccacattggtgatctgcagttcagggtagacttcttggcaatactgcaggatgccttccttggtatcaatgcaggttttggtccctgatggatctgaatcccacttcccattctggacattcatgtgcatgttcagtctgccacagaacatggcaatctggggttcagccagcaggccagcattaccatcagtgggtacctccagcgcccgagccgtccaggcggccagcaggagcagtgccaaaccgggcagcatcgcgaccctgcgcggggcaccgagtgcgctgctgtgcgagtgggatccgccgcgtccttgctctgcccgcgccgccaccgccgccgtctcccggggcccccgcgcacgctcctccgcgtgctctcgcctaccgctgccgaggaaactgac

SEQ ID NO: 9 - protein, 695 aa, Homo sapiens
MLPGLALLLLAAWTARALEVPTDGNAGLLAEPQIAMFCGRLNMHMNVQNGKWDSDPSGTKTCIDTKEGILQYCQEVYPELQITNVVEANQPVTIQNWCKRGRKQCKTHPHFVIPYRCLVGEFVSDALLVPDKCKFLHQERMDVCETHLHWHTVAKETCSEKSTNLHDYGMLLPCGIDKFRGVEFVCCPLAEESDNVDSADAEEDDSDVWWGGADTDYADGSEDKVVEVAEEEEVAEVEEEEADDDEDDEDGDEVEEEAEEPYEEATERTTSIATTTTTTTESVEEVVRVPTTAASTPDAVDKYLETPGDENEHAHFQKAKERLEAKHRERMSQVMREWEEAERQAKNLPKADKKAVIQHFQEKVESLEQEAANERQQLVETHMARVEAMLNDRRRLALENYITALQAVPPRPRHVFNMLKKYVRAEQKDRQHTLKHFEHVRMVDPKKAAQIRSQVMTHLRVIYERMNQSLSLLYNVPAVAEEIQDEVDELLQKEQNYSDDVLANMISEPRISYGNDALMPSLTETKTTVELLPVNGEFSLDDLQPWHSFGADSVPANTENEVEPVDARPAADRGLTTRPGSGLTNIKTEEISEVKMDAEFRHDSGYEVHHQKLVFFAEDVGSNKGAIIGLMVGGVVIATVIVITLVMLKKKQYTSIHHGVVEVDAAVTPEERHLSKMQQNGYENPTYKFFEQMQN

SEQ ID NO: 10 - DNA, 3583 bp, Homo sapiens
  source 1..3583: mol_type = other DNA
gtcagtttcctcggcagcggtaggcgagagcacgcggaggagcgtgcgcgggggccccgggagacggcggcggtggcggcgcgggcagagcaaggacgcggcggatcccactcgcacagcagcgcactcggtgccccgcgcagggtcgcgatgctgcccggtttggcactgctcctgctggccgcctggacggctcgggcgctggaggtacccactgatggtaatgctggcctgctggctgaaccccagattgccatgttctgtggcagactgaacatgcacatgaatgtccagaatgggaagtgggattcagatccatcagggaccaaaacctgcattgataccaaggaaggcatcctgcagtattgccaagaagtctaccctgaactgcagatcaccaatgtggtagaagccaaccaaccagtgaccatccagaactggtgcaagcggggccgcaagcagtgcaagacccatccccactttgtgattccctaccgctgcttagttggtgagtttgtaagtgatgcccttctcgttcctgacaagtgcaaattcttacaccaggagaggatggatgtttgcgaaactcatcttcactggcacaccgtcgccaaagagacatgcagtgagaagagtaccaacttgcatgactacggcatgttgctgccctgcggaattgacaagttccgaggggtagagtttgtgtgttgcccactggctgaagaaagtgacaatgtggattctgctgatgcggaggaggatgactcggatgtctggtggggcggagcagacacagactatgcagatgggagtgaagacaaagtagtagaagtagcagaggaggaagaagtggctgaggtggaagaagaagaagccgatgatgacgaggacgatgaggatggtgatgaggtagaggaagaggctgaggaaccctacgaagaagccacagagagaaccaccagcattgccaccaccaccaccaccaccacagagtctgtggaagaggtggttcgagaggtgtgctctgaacaagccgagacggggccgtgccgagcaatgatctcccgctggtactttgatgtgactgaagggaagtgtgccccattcttttacggcggatgtggcggcaaccggaacaactttgacacagaagagtactgcatggccgtgtgtggcagcgccatgtcccaaagtttactcaagactacccaggaacctcttgcccgagatcctgttaaacttcctacaacagcagccagtacccctgatgccgttgacaagtatctcgagacacctggggatgagaatgaacatgcccatttccagaaagccaaagagaggcttgaggccaagcaccgagagagaatgtcccaggtcatgagagaatgggaagaggcagaacgtcaagcaaagaacttgcctaaagctgataagaaggcagttatccagcatttccaggagaaagtggaatctttggaacaggaagcagccaacgagagacagcagctggtggagacacacatggccagagtggaagccatgctcaatgaccgccgccgcctggccctggagaactacatcaccgctctgcaggctgttcctcctcggcctcgtcacgtgttcaatatgctaaagaagtatgtccgcgcagaacagaaggacagacagcacaccctaaagcatttcgagcatgtgcgcatggtggatcccaagaaagccgctcagatccggtcccaggttatgacacacctccgtgtgatttatgagcgcatgaatcagtctctctccctgctctacaacgtgcctgcagtggccgaggagattcaggatgaagttgatgagctgcttcagaaagagcaaaactattcagatgacgtcttggccaacatgattagtgaaccaaggatcagttacggaaacgatgctctcatgccatctttgaccgaaacgaaaaccaccgtggagctccttcccgtgaatggagagttcagcctggacgatctccagccgtggcattcttttggggctgactctgtgccagccaacacagaaaacgaagttgagcctgttgatgcccgccctgctgccgaccgaggactgaccactcgaccaggttctgggttgacaaatatcaagacggaggagatctctgaagtgaagatggatgcagaattccgacatgactcaggatatgaagttcatcatcaaaaattggtgttctttgcagaagatgtgggttcaaacaaaggtgcaatcattggactcatggtgggcggtgttgtcatagcgacagtgatcgtcatcaccttggtgatgctgaagaagaaacagtacacatccattcatcatggtgtggtggaggttgacgccgctgtcaccccagaggagcgccacctgtccaagatgcagcagaacggctacgaaaatccaacctacaagttctttgagcagatgcagaactagacccccgccacagcagcctctgaagttggacagcaaaaccattgcttcactacccatcggtgtccatttatagaataatgtgggaagaaacaaacccgttttatgatttactcattatcgccttttgacagctgtgctgtaacacaagtagatgcctgaacttgaattaatccacacatcagtaatgtattctatctctctttacattttggtctctatactacattattaatgggttttgtgtactgtaaagaatttagctgtatcaaactagtgcatgaatagattctctcctgattatttatcacatagccccttagccagttgtatattattcttgtggtttgtgacccaattaagtcctactttacatatgctttaagaatcgatgggggatgcttcatgtgaacgtgggagttcagctgcttctcttgcctaagtattcctttcctgatcactatgcattttaaagttaaacatttttaagtatttcagatgctttagagagattttttttccatgactgcattttactgtacagattgctgcttctgctatatttgtgatataggaattaagaggatacacacgtttgtttcttcgtgcctgttttatgtgcacacattaggcattgagacttcaagcttttctttttttgtccacgtatctttgggtctttgataaagaaaagaatccctgttcattgtaagcacttttacggggcgggtggggaggggtgctctgctggtcttcaattaccaagaattctccaaaacaattttctgcaggatgattgtacagaatcattgcttatgacatgatcgctttctacactgtattacataaataaattaaataaaataaccccgggcaagacttttctttgaaggatgactacagacattaaataatcgaagtaattttgggtggggagaagaggcagattcaattttctttaaccagtctgaagtttcatttatgatacaaaagaagatgaaaatggaagtggcaatataaggggatgaggaaggcatgcctggacaaacccttcttttaagatgtgtcttcaatttgtataaaatggtgttttcatgtaaataaatacattcttggaggagca

SEQ ID NO: 11 - DNA, 3583 bp, synthetic construct
  misc_feature 1..3583: note = Synthetic
  source 1..3583: mol_type = other DNA
tgctcctccaagaatgtatttatttacatgaaaacaccattttatacaaattgaagacacatcttaaaagaagggtttgtccaggcatgccttcctcatccccttatattgccacttccattttcatcttcttttgtatcataaatgaaacttcagactggttaaagaaaattgaatctgcctcttctccccacccaaaattacttcgattatttaatgtctgtagtcatccttcaaagaaaagtcttgcccggggttattttatttaatttatttatgtaatacagtgtagaaagcgatcatgtcataagcaatgattctgtacaatcatcctgcagaaaattgttttggagaattcttggtaattgaagaccagcagagcacccctccccacccgccccgtaaaagtgcttacaatgaacagggattcttttctttatcaaagacccaaagatacgtggacaaaaaaagaaaagcttgaagtctcaatgcctaatgtgtgcacataaaacaggcacgaagaaacaaacgtgtgtatcctcttaattcctatatcacaaatatagcagaagcagcaatctgtacagtaaaatgcagtcatggaaaaaaaatctctctaaagcatctgaaatacttaaaaatgtttaactttaaaatgcatagtgatcaggaaaggaatacttaggcaagagaagcagctgaactcccacgttcacatgaagcatcccccatcgattcttaaagcatatgtaaagtaggacttaattgggtcacaaaccacaagaataatatacaactggctaaggggctatgtgataaataatcaggagagaatctattcatgcactagtttgatacagctaaattctttacagtacacaaaacccattaataatgtagtatagagaccaaaatgtaaagagagatagaatacattactgatgtgtggattaattcaagttcaggcatctacttgtgttacagcacagctgtcaaaaggcgataatgagtaaatcataaaacgggtttgtttcttcccacattattctataaatggacaccgatgggtagtgaagcaatggttttgctgtccaacttcagaggctgctgtggcgggggtctagttctgcatctgctcaaagaacttgtaggttggattttcgtagccgttctgctgcatcttggacaggtggcgctcctctggggtgacagcggcgtcaacctccaccacaccatgatgaatggatgtgtactgtttcttcttcagcatcaccaaggtgatgacgatcactgtcgctatgacaacaccgcccaccatgagtccaatgattgcacctttgtttgaacccacatcttctgcaaagaacaccaatttttgatgatgaacttcatatcctgagtcatgtcggaattctgcatccatcttcacttcagagatctcctccgtcttgatatttgtcaacccagaacctggtcgagtggtcagtcctcggtcggcagcagggcgggcatcaacaggctcaacttcgttttctgtgttggctggcacagagtcagccccaaaagaatgccacggctggagatcgtccaggctgaactctccattcacgggaaggagctccacggtggttttcgtttcggtcaaagatggcatgagagcatcgtttccgtaactgatccttggttcactaatcatgttggccaagacgtcatctgaatagttttgctctttctgaagcagctcatcaacttcatcctgaatctcctcggccactgcaggcacgttgtagagcagggagagagactgattcatgcgctcataaatcacacggaggtgtgtcataacctgggaccggatctgagcggctttcttgggatccaccatgcgcacatgctcgaaatgctttagggtgtgctgtctgtccttctgttctgcgcggacatacttctttagcatattgaacacgtgacgaggccgaggaggaacagcctgcagagcggtgatgtagttctccagggccaggcggcggcggtcattgagcatggcttccactctggccatgtgtgtctccaccagctgctgtctctcgttggctgcttcctgttccaaagattccactttctcctggaaatgctggataactgccttcttatcagctttaggcaagttctttgcttgacgttctgcctcttcccattctctcatgacctgggacattctctctcggtgcttggcctcaagcctctctttggctttctggaaatgggcatgttcattctcatccccaggtgtctcgagatacttgtcaacggcatcaggggtactggctgctgttgtaggaagtttaacaggatctcgggcaagaggttcctgggtagtcttgagtaaactttgggacatggcgctgccacacacggccatgcagtactcttctgtgtcaaagttgttccggttgccgccacatccgccgtaaaagaatggggcacacttcccttcagtcacatcaaagtaccagcgggagatcattgctcggcacggccccgtctcggcttgttcagagcacacctctcgaaccacctcttccacagactctgtggtggtggtggtggtggtggcaatgctggtggttctctctgtggcttcttcgtagggttcctcagcctcttcctctacctcatcaccatcctcatcgtcctcgtcatcatcggcttcttcttcttccacctcagccacttcttcctcctctgctacttctactactttgtcttcactcccatctgcatagtctgtgtctgctccgccccaccagacatccgagtcatcctcctccgcatcagcagaatccacattgtcactttcttcagccagtgggcaacacacaaactctacccctcggaacttgtcaattccgcagggcagcaacatgccgtagtcatgcaagttggtactcttctcactgcatgtctctttggcgacggtgtgccagtgaagatgagtttcgcaaacatccatcctctcctggtgtaagaatttgcacttgtcaggaacgagaagggcatcacttacaaactcaccaactaagcagcggtagggaatcacaaagtggggatgggtcttgcactgcttgcggccccgcttgcaccagttctggatggtcactggttggttggcttctaccacattggtgatctgcagttcagggtagacttcttggcaatactgcaggatgccttccttggtatcaatgcaggttttggtccctgatggatctgaatcccacttcccattctggacattcatgtgcatgttcagtctgccacagaacatggcaatctggggttcagccagcaggccagcattaccatcagtgggtacctccagcgcccgagccgtccaggcggccagcaggagcagtgccaaaccgggcagcatcgcgaccctgcgcggggcaccgagtgcgctgctgtgcgagtgggatccgccgcgtccttgctctgcccgcgccgccaccgccgccgtctcccggggcccccgcgcacgctcctccgcgtgctctcgcctaccgctgccgaggaaactgac

SEQ ID NO: 12 - protein, 770 aa, Homo sapiens
MLPGLALLLLAAWTARALEVPTDGNAGLLAEPQIAMFCGRLNMHMNVQNGKWDSDPSGTKTCIDTKEGILQYCQEVYPELQITNVVEANQPVTIQNWCKRGRKQCKTHPHFVIPYRCLVGEFVSDALLVPDKCKFLHQERMDVCETHLHWHTVAKETCSEKSTNLHDYGMLLPCGIDKFRGVEFVCCPLAEESDNVDSADAEEDDSDVWWGGADTDYADGSEDKVVEVAEEEEVAEVEEEEADDDEDDEDGDEVEEEAEEPYEEATERTTSIATTTTTTTESVEEVVREVCSEQAETGPCRAMISRWYFDVTEGKCAPFFYGGCGGNRNNFDTEEYCMAVCGSAMSQSLLKTTQEPLARDPVKLPTTAASTPDAVDKYLETPGDENEHAHFQKAKERLEAKHRERMSQVMREWEEAERQAKNLPKADKKAVIQHFQEKVESLEQEAANERQQLVETHMARVEAMLNDRRRLALENYITALQAVPPRPRHVFNMLKKYVRAEQKDRQHTLKHFEHVRMVDPKKAAQIRSQVMTHLRVIYERMNQSLSLLYNVPAVAEEIQDEVDELLQKEQNYSDDVLANMISEPRISYGNDALMPSLTETKTTVELLPVNGEFSLDDLQPWHSFGADSVPANTENEVEPVDARPAADRGLTTRPGSGLTNIKTEEISEVKMDAEFRHDSGYEVHHQKLVFFAEDVGSNKGAIIGLMVGGVVIATVIVITLVMLKKKQYTSIHHGVVEVDAAVTPEERHLSKMQQNGYENPTYKFFEQMQN

SEQ ID NO: 13 - DNA, 3526 bp, Homo sapiens
  source 1..3526: mol_type = other DNA
gtcagtttcctcggcagcggtaggcgagagcacgcggaggagcgtgcgcgggggccccgggagacggcggcggtggcggcgcgggcagagcaaggacgcggcggatcccactcgcacagcagcgcactcggtgccccgcgcagggtcgcgatgctgcccggtttggcactgctcctgctggccgcctggacggctcgggcgctggaggtacccactgatggtaatgctggcctgctggctgaaccccagattgccatgttctgtggcagactgaacatgcacatgaatgtccagaatgggaagtgggattcagatccatcagggaccaaaacctgcattgataccaaggaaggcatcctgcagtattgccaagaagtctaccctgaactgcagatcaccaatgtggtagaagccaaccaaccagtgaccatccagaactggtgcaagcggggccgcaagcagtgcaagacccatccccactttgtgattccctaccgctgcttagttggtgagtttgtaagtgatgcccttctcgttcctgacaagtgcaaattcttacaccaggagaggatggatgtttgcgaaactcatcttcactggcacaccgtcgccaaagagacatgcagtgagaagagtaccaacttgcatgactacggcatgttgctgccctgcggaattgacaagttccgaggggtagagtttgtgtgttgcccactggctgaagaaagtgacaatgtggattctgctgatgcggaggaggatgactcggatgtctggtggggcggagcagacacagactatgcagatgggagtgaagacaaagtagtagaagtagcagaggaggaagaagtggctgaggtggaagaagaagaagccgatgatgacgaggacgatgaggatggtgatgaggtagaggaagaggctgaggaaccctacgaagaagccacagagagaaccaccagcattgccaccaccaccaccaccaccacagagtctgtggaagaggtggttcgagaggtgtgctctgaacaagccgagacggggccgtgccgagcaatgatctcccgctggtactttgatgtgactgaagggaagtgtgccccattcttttacggcggatgtggcggcaaccggaacaactttgacacagaagagtactgcatggccgtgtgtggcagcgccattcctacaacagcagccagtacccctgatgccgttgacaagtatctcgagacacctggggatgagaatgaacatgcccatttccagaaagccaaagagaggcttgaggccaagcaccgagagagaatgtcccaggtcatgagagaatgggaagaggcagaacgtcaagcaaagaacttgcctaaagctgataagaaggcagttatccagcatttccaggagaaagtggaatctttggaacaggaagcagccaacgagagacagcagctggtggagacacacatggccagagtggaagccatgctcaatgaccgccgccgcctggccctggagaactacatcaccgctctgcaggctgttcctcctcggcctcgtcacgtgttcaatatgctaaagaagtatgtccgcgcagaacagaaggacagacagcacaccctaaagcatttcgagcatgtgcgcatggtggatcccaagaaagccgctcagatccggtcccaggttatgacacacctccgtgtgatttatgagcgcatgaatcagtctctctccctgctctacaacgtgcctgcagtggccgaggagattcaggatgaagttgatgagctgcttcagaaagagcaaaactattcagatgacgtcttggccaacatgattagtgaaccaaggatcagttacggaaacgatgctctcatgccatctttgaccgaaacgaaaaccaccgtggagctccttcccgtgaatggagagttcagcctggacgatctccagccgtggcattcttttggggctgactctgtgccagccaacacagaaaacgaagttgagcctgttgatgcccgccctgctgccgaccgaggactgaccactcgaccaggttctgggttgacaaatatcaagacggaggagatctctgaagtgaagatggatgcagaattccgacatgactcaggatatgaagttcatcatcaaaaattggtgttctttgcagaagatgtgggttcaaacaaaggtgcaatcattggactcatggtgggcggtgttgtcatagcgacagtgatcgtcatcaccttggtgatgctgaagaagaaacagtacacatccattcatcatggtgtggtggaggttgacgccgctgtcaccccagaggagcgccacctgtccaagatgcagcagaacggctacgaaaatccaacctacaagttctttgagcagatgcagaactagacccccgccacagcagcctctgaagttggacagcaaaaccattgcttcactacccatcggtgtccatttatagaataatgtgggaagaaacaaacccgttttatgatttactcattatcgccttttgacagctgtgctgtaacacaagtagatgcctgaacttgaattaatccacacatcagtaatgtattctatctctctttacattttggtctctatactacattattaatgggttttgtgtactgtaaagaatttagctgtatcaaactagtgcatgaatagattctctcctgattatttatcacatagccccttagccagttgtatattattcttgtggtttgtgacccaattaagtcctactttacatatgctttaagaatcgatgggggatgcttcatgtgaacgtgggagttcagctgcttctcttgcctaagtattcctttcctgatcactatgcattttaaagttaaacatttttaagtatttcagatgctttagagagattttttttccatgactgcattttactgtacagattgctgcttctgctatatttgtgatataggaattaagaggatacacacgtttgtttcttcgtgcctgttttatgtgcacacattaggcattgagacttcaagcttttctttttttgtccacgtatctttgggtctttgataaagaaaagaatccctgttcattgtaagcacttttacggggcgggtggggaggggtgctctgctggtcttcaattaccaagaattctccaaaacaattttctgcaggatgattgtacagaatcattgcttatgacatgatcgctttctacactgtattacataaataaattaaataaaataaccccgggcaagacttttctttgaaggatgactacagacattaaataatcgaagtaattttgggtggggagaagaggcagattcaattttctttaaccagtctgaagtttcatttatgatacaaaagaagatgaaaatggaagtggcaatataaggggatgaggaaggcatgcctggacaaacccttcttttaagatgtgtcttcaatttgtataaaatggtgttttcatgtaaataaatacattcttggaggagca

SEQ ID NO: 14 - DNA, 3526 bp, synthetic construct
  misc_feature 1..3526: note = Synthetic
  source 1..3526: mol_type = other DNA
tgctcctccaagaatgtatttatttacatgaaaacaccattttatacaaattgaagacacatcttaaaagaagggtttgtccaggcatgccttcctcatccccttatattgccacttccattttcatcttcttttgtatcataaatgaaacttcagactggttaaagaaaattgaatctgcctcttctccccacccaaaattacttcgattatttaatgtctgtagtcatccttcaaagaaaagtcttgcccggggttattttatttaatttatttatgtaatacagtgtagaaagcgatcatgtcataagcaatgattctgtacaatcatcctgcagaaaattgttttggagaattcttggtaattgaagaccagcagagcacccctccccacccgccccgtaaaagtgcttacaatgaacagggattcttttctttatcaaagacccaaagatacgtggacaaaaaaagaaaagcttgaagtctcaatgcctaatgtgtgcacataaaacaggcacgaagaaacaaacgtgtgtatcctcttaattcctatatcacaaatatagcagaagcagcaatctgtacagtaaaatgcagtcatggaaaaaaaatctctctaaagcatctgaaatacttaaaaatgtttaactttaaaatgcatagtgatcaggaaaggaatacttaggcaagagaagcagctgaactcccacgttcacatgaagcatcccccatcgattcttaaagcatatgtaaagtaggacttaattgggtcacaaaccacaagaataatatacaactggctaaggggctatgtgataaataatcaggagagaatctattcatgcactagtttgatacagctaaattctttacagtacacaaaacccattaataatgtagtatagagaccaaaatgtaaagagagatagaatacattactgatgtgtggattaattcaagttcaggcatctacttgtgttacagcacagctgtcaaaaggcgataatgagtaaatcataaaacgggtttgtttcttcccacattattctataaatggacaccgatgggtagtgaagcaatggttttgctgtccaacttcagaggctgctgtggcgggggtctagttctgcatctgctcaaagaacttgtaggttggattttcgtagccgttctgctgcatcttggacaggtggcgctcctctggggtgacagcggcgtcaacctccaccacaccatgatgaatggatgtgtactgtttcttcttcagcatcaccaaggtgatgacgatcactgtcgctatgacaacaccgcccaccatgagtccaatgattgcacctttgtttgaacccacatcttctgcaaagaacaccaatttttgatgatgaacttcatatcctgagtcatgtcggaattctgcatccatcttcacttcagagatctcctccgtcttgatatttgtcaacccagaacctggtcgagtggtcagtcctcggtcggcagcagggcgggcatcaacaggctcaacttcgttttctgtgttggctggcacagagtcagccccaaaagaatgccacggctggagatcgtccaggctgaactctccattcacgggaaggagctccacggtggttttcgtttcggtcaaagatggcatgagagcatcgtttccgtaactgatccttggttcactaatcatgttggccaagacgtcatctgaatagttttgctctttctgaagcagctcatcaacttcatcctgaatctcctcggccactgcaggcacgttgtagagcagggagagagactgattcatgcgctcataaatcacacggaggtgtgtcataacctgggaccggatctgagcggctttcttgggatccaccatgcgcacatgctcgaaatgctttagggtgtgctgtctgtccttctgttctgcgcggacatacttctttagcatattgaacacgtgacgaggccgaggaggaacagcctgcagagcggtgatgtagttctccagggccaggcggcggcggtcattgagcatggcttccactctggccatgtgtgtctccaccagctgctgtctctcgttggctgcttcctgttccaaagattccactttctcctggaaatgctggataactgccttcttatcagctttaggcaagttctttgcttgacgttctgcctcttcccattctctcatgacctgggacattctctctcggtgcttggcctcaagcctctctttggctttctggaaatgggcatgttcattctcatccccaggtgtctcgagatacttgtcaacggcatcaggggtactggctgctgttgtaggaatggcgctgccacacacggccatgcagtactcttctgtgtcaaagttgttccggttgccgccacatccgccgtaaaagaatggggcacacttcccttcagtcacatcaaagtaccagcgggagatcattgctcggcacggccccgtctcggcttgttcagagcacacctctcgaaccacctcttccacagactctgtggtggtggtggtggtggtggcaatgctggtggttctctctgtggcttcttcgtagggttcctcagcctcttcctctacctcatcaccatcctcatcgtcctcgtcatcatcggcttcttcttcttccacctcagccacttcttcctcctctgctacttctactactttgtcttcactcccatctgcatagtctgtgtctgctccgccccaccagacatccgagtcatcctcctccgcatcagcagaatccacattgtcactttcttcagccagtgggcaacacacaaactctacccctcggaacttgtcaattccgcagggcagcaacatgccgtagtcatgcaagttggtactcttctcactgcatgtctctttggcgacggtgtgccagtgaagatgagtttcgcaaacatccatcctctcctggtgtaagaatttgcacttgtcaggaacgagaagggcatcacttacaaactcaccaactaagcagcggtagggaatcacaaagtggggatgggtcttgcactgcttgcggccccgcttgcaccagttctggatggtcactggttggttggcttctaccacattggtgatctgcagttcagggtagacttcttggcaatactgcaggatgccttccttggtatcaatgcaggttttggtccctgatggatctgaatcccacttcccattctggacattcatgtgcatgttcagtctgccacagaacatggcaatctggggttcagccagcaggccagcattaccatcagtgggtacctccagcgcccgagccgtccaggcggccagcaggagcagtgccaaaccgggcagcatcgcgaccctgcgcggggcaccgagtgcgctgctgtgcgagtgggatccgccgcgtccttgctctgcccgcgccgccaccgccgccgtctcccggggcccccgcgcacgctcctccgcgtgctctcgcctaccgctgccgaggaaactgac

SEQ ID NO: 15 - protein, 751 aa, Homo sapiens
MLPGLALLLLAAWTARALEVPTDGNAGLLAEPQIAMFCGRLNMHMNVQNGKWDSDPSGTKTCIDTKEGILQYCQEVYPELQITNVVEANQPVTIQNWCKRGRKQCKTHPHFVIPYRCLVGEFVSDALLVPDKCKFLHQERMDVCETHLHWHTVAKETCSEKSTNLHDYGMLLPCGIDKFRGVEFVCCPLAEESDNVDSADAEEDDSDVWWGGADTDYADGSEDKVVEVAEEEEVAEVEEEEADDDEDDEDGDEVEEEAEEPYEEATERTTSIATTTTTTTESVEEVVREVCSEQAETGPCRAMISRWYFDVTEGKCAPFFYGGCGGNRNNFDTEEYCMAVCGSAIPTTAASTPDAVDKYLETPGDENEHAHFQKAKERLEAKHRERMSQVMREWEEAERQAKNLPKADKKAVIQHFQEKVESLEQEAANERQQLVETHMARVEAMLNDRRRLALENYITALQAVPPRPRHVFNMLKKYVRAEQKDRQHTLKHFEHVRMVDPKKAAQIRSQVMTHLRVIYERMNQSLSLLYNVPAVAEEIQDEVDELLQKEQNYSDDVLANMISEPRISYGNDALMPSLTETKTTVELLPVNGEFSLDDLQPWHSFGADSVPANTENEVEPVDARPAADRGLTTRPGSGLTNIKTEEISEVKMDAEFRHDSGYEVHHQKLVFFAEDVGSNKGAIIGLMVGGVVIATVIVITLVMLKKKQYTSIHHGVVEVDAAVTPEERHLSKMQQNGYENPTYKFFEQMQN

SEQ ID NO: 16 - DNA, 3572 bp, Homo sapiens
  source 1..3572: mol_type = other DNA
aaatagcacagccttgctgtgcgtggtagaagttgggttagtgttgacatgctgttgactcaccctcccgaggatggaagctctggcctgggtcaagttgtggtcactgcagttaacagtttgttgatctcagggagtattccacagttgctgatgtaattgacaatgattggagccagctcttccccagattcaaatggaccaattagaggacttgttggttctgtttatcaactatgtacccactgatggtaatgctggcctgctggctgaaccccagattgccatgttctgtggcagactgaacatgcacatgaatgtccagaatgggaagtgggattcagatccatcagggaccaaaacctgcattgataccaaggaaggcatcctgcagtattgccaagaagtctaccctgaactgcagatcaccaatgtggtagaagccaaccaaccagtgaccatccagaactggtgcaagcggggccgcaagcagtgcaagacccatccccactttgtgattccctaccgctgcttagttggtgagtttgtaagtgatgcccttctcgttcctgacaagtgcaaattcttacaccaggagaggatggatgtttgcgaaactcatcttcactggcacaccgtcgccaaagagacatgcagtgagaagagtaccaacttgcatgactacggcatgttgctgccctgcggaattgacaagttccgaggggtagagtttgtgtgttgcccactggctgaagaaagtgacaatgtggattctgctgatgcggaggaggatgactcggatgtctggtggggcggagcagacacagactatgcagatgggagtgaagacaaagtagtagaagtagcagaggaggaagaagtggctgaggtggaagaagaagaagccgatgatgacgaggacgatgaggatggtgatgaggtagaggaagaggctgaggaaccctacgaagaagccacagagagaaccaccagcattgccaccaccaccaccaccaccacagagtctgtggaagaggtggttcgagaggtgtgctctgaacaagccgagacggggccgtgccgagcaatgatctcccgctggtactttgatgtgactgaagggaagtgtgccccattcttttacggcggatgtggcggcaaccggaacaactttgacacagaagagtactgcatggccgtgtgtggcagcgccattcctacaacagcagccagtacccctgatgccgttgacaagtatctcgagacacctggggatgagaatgaacatgcccatttccagaaagccaaagagaggcttgaggccaagcaccgagagagaatgtcccaggtcatgagagaatgggaagaggcagaacgtcaagcaaagaacttgcctaaagctgataagaaggcagttatccagcatttccaggagaaagtggaatctttggaacaggaagcagccaacgagagacagcagctggtggagacacacatggccagagtggaagccatgctcaatgaccgccgccgcctggccctggagaactacatcaccgctctgcaggctgttcctcctcggcctcgtcacgtgttcaatatgctaaagaagtatgtccgcgcagaacagaaggacagacagcacaccctaaagcatttcgagcatgtgcgcatggtggatcccaagaaagccgctcagatccggtcccaggttatgacacacctccgtgtgatttatgagcgcatgaatcagtctctctccctgctctacaacgtgcctgcagtggccgaggagattcaggatgaagttgatgagctgcttcagaaagagcaaaactattcagatgacgtcttggccaacatgattagtgaaccaaggatcagttacggaaacgatgctctcatgccatctttgaccgaaacgaaaaccaccgtggagctccttcccgtgaatggagagttcagcctggacgatctccagccgtggcattcttttggggctgactctgtgccagccaacacagaaaacgaagttgagcctgttgatgcccgccctgctgccgaccgaggactgaccactcgaccaggttctgggttgacaaatatcaagacggaggagatctctgaagtgaagatggatgcagaattccgacatgactcaggatatgaagttcatcatcaaaaattggtgttctttgcagaagatgtgggttcaaacaaaggtgcaatcattggactcatggtgggcggtgttgtcatagcgacagtgatcgtcatcaccttggtgatgctgaagaagaaacagtacacatccattcatcatggtgtggtggaggttgacgccgctgtcaccccagaggagcgccacctgtccaagatgcagcagaacggctacgaaaatccaacctacaagttctttgagcagatgcagaactagacccccgccacagcagcctctgaagttggacagcaaaaccattgcttcactacccatcggtgtccatttatagaataatgtgggaagaaacaaacccgttttatgatttactcattatcgccttttgacagctgtgctgtaacacaagtagatgcctgaacttgaattaatccacacatcagtaatgtattctatctctctttacattttggtctctatactacattattaatgggttttgtgtactgtaaagaatttagctgtatcaaactagtgcatgaatagattctctcctgattatttatcacatagccccttagccagttgtatattattcttgtggtttgtgacccaattaagtcctactttacatatgctttaagaatcgatgggggatgcttcatgtgaacgtgggagttcagctgcttctcttgcctaagtattcctttcctgatcactatgcattttaaagttaaacatttttaagtatttcagatgctttagagagattttttttccatgactgcattttactgtacagattgctgcttctgctatatttgtgatataggaattaagaggatacacacgtttgtttcttcgtgcctgttttatgtgcacacattaggcattgagacttcaagcttttctttttttgtccacgtatctttgggtctttgataaagaaaagaatccctgttcattgtaagcacttttacggggcgggtggggaggggtgctctgctggtcttcaattaccaagaattctccaaaacaattttctgcaggatgattgtacagaatcattgcttatgacatgatcgctttctacactgtattacataaataaattaaataaaataaccccgggcaagacttttctttgaaggatgactacagacattaaataatcgaagtaattttgggtggggagaagaggcagattcaattttctttaaccagtctgaagtttcatttatgatacaaaagaagatgaaaatggaagtggcaatataaggggatgaggaaggcatgcctggacaaacccttcttttaagatgtgtcttcaatttgtataaaatggtgttttcatgtaaataaatacattcttggaggagcaaaaaaaaaaaaaaaa

SEQ ID NO: 17 - DNA, 3572 bp, synthetic construct
  misc_feature 1..3572: note = Synthetic
  source 1..3572: mol_type = other DNA
ttttttttttttttttgctcctccaagaatgtatttatttacatgaaaacaccattttatacaaattgaagacacatcttaaaagaagggtttgtccaggcatgccttcctcatccccttatattgccacttccattttcatcttcttttgtatcataaatgaaacttcagactggttaaagaaaattgaatctgcctcttctccccacccaaaattacttcgattatttaatgtctgtagtcatccttcaaagaaaagtcttgcccggggttattttatttaatttatttatgtaatacagtgtagaaagcgatcatgtcataagcaatgattctgtacaatcatcctgcagaaaattgttttggagaattcttggtaattgaagaccagcagagcacccctccccacccgccccgtaaaagtgcttacaatgaacagggattcttttctttatcaaagacccaaagatacgtggacaaaaaaagaaaagcttgaagtctcaatgcctaatgtgtgcacataaaacaggcacgaagaaacaaacgtgtgtatcctcttaattcctatatcacaaatatagcagaagcagcaatctgtacagtaaaatgcagtcatggaaaaaaaatctctctaaagcatctgaaatacttaaaaatgtttaactttaaaatgcatagtgatcaggaaaggaatacttaggcaagagaagcagctgaactcccacgttcacatgaagcatcccccatcgattcttaaagcatatgtaaagtaggacttaattgggtcacaaaccacaagaataatatacaactggctaaggggctatgtgataaataatcaggagagaatctattcatgcactagtttgatacagctaaattctttacagtacacaaaacccattaataatgtagtatagagaccaaaatgtaaagagagatagaatacattactgatgtgtggattaattcaagttcaggcatctacttgtgttacagcacagctgtcaaaaggcgataatgagtaaatcataaaacgggtttgtttcttcccacattattctataaatggacaccgatgggtagtgaagcaatggttttgctgtccaacttcagaggctgctgtggcgggggtctagttctgcatctgctcaaagaacttgtaggttggattttcgtagccgttctgctgcatcttggacaggtggcgctcctctggggtgacagcggcgtcaacctccaccacaccatgatgaatggatgtgtactgtttcttcttcagcatcaccaaggtgatgacgatcactgtcgctatgacaacaccgcccaccatgagtccaatgattgcacctttgtttgaacccacatcttctgcaaagaacaccaatttttgatgatgaacttcatatcctgagtcatgtcggaattctgcatccatcttcacttcagagatctcctccgtcttgatatttgtcaacccagaacctggtcgagtggtcagtcctcggtcggcagcagggcgggcatcaacaggctcaacttcgttttctgtgttggctggcacagagtcagccccaaaagaatgccacggctggagatcgtccaggctgaactctccattcacgggaaggagctccacggtggttttcgtttcggtcaaagatggcatgagagcatcgtttccgtaactgatccttggttcactaatcatgttggccaagacgtcatctgaatagttttgctctttctgaagcagctcatcaacttcatcctgaatctcctcggccactgcaggcacgttgtagagcagggagagagactgattcatgcgctcataaatcacacggaggtgtgtcataacctgggaccggatctgagcggctttcttgggatccaccatgcgcacatgctcgaaatgctttagggtgtgctgtctgtccttctgttctgcgcggacatacttctttagcatattgaacacgtgacgaggccgaggaggaacagcctgcagagcggtgatgtagttctccagggccaggcggcggcggtcattgagcatggcttccactctggccatgtgtgtctccaccagctgctgtctctcgttggctgcttcctgttccaaagattccactttctcctggaaatgctggataactgccttcttatcagctttaggcaagttctttgcttgacgttctgcctcttcccattctctcatgacctgggacattctctctcggtgcttggcctcaagcctctctttggctttctggaaatgggcatgttcattctcatccccaggtgtctcgagatacttgtcaacggcatcaggggtactggctgctgttgtaggaatggcgctgccacacacggccatgcagtactcttctgtgtcaaagttgttccggttgccgccacatccgccgtaaaagaatggggcacacttcccttcagtcacatcaaagtaccagcgggagatcattgctcggcacggccccgtctcggcttgttcagagcacacctctcgaaccacctcttccacagactctgtggtggtggtggtggtggtggcaatgctggtggttctctctgtggcttcttcgtagggttcctcagcctcttcctctacctcatcaccatcctcatcgtcctcgtcatcatcggcttcttcttcttccacctcagccacttcttcctcctctgctacttctactactttgtcttcactcccatctgcatagtctgtgtctgctccgccccaccagacatccgagtcatcctcctccgcatcagcagaatccacattgtcactttcttcagccagtgggcaacacacaaactctacccctcggaacttgtcaattccgcagggcagcaacatgccgtagtcatgcaagttggtactcttctcactgcatgtctctttggcgacggtgtgccagtgaagatgagtttcgcaaacatccatcctctcctggtgtaagaatttgcacttgtcaggaacgagaagggcatcacttacaaactcaccaactaagcagcggtagggaatcacaaagtggggatgggtcttgcactgcttgcggccccgcttgcaccagttctggatggtcactggttggttggcttctaccacattggtgatctgcagttcagggtagacttcttggcaatactgcaggatgccttccttggtatcaatgcaggttttggtccctgatggatctgaatcccacttcccattctggacattcatgtgcatgttcagtctgccacagaacatggcaatctggggttcagccagcaggccagcattaccatcagtgggtacatagttgataaacagaaccaacaagtcctctaattggtccatttgaatctggggaagagctggctccaatcattgtcaattacatcagcaactgtggaatactccctgagatcaacaaactgttaactgcagtgaccacaacttgacccaggccagagcttccatcctcgggagggtgagtcaacagcatgtcaacactaacccaacttctaccacgcacagcaaggctgtgctattt

SEQ ID NO: 18 - protein, 746 aa, Homo sapiens
MDQLEDLLVLFINYVPTDGNAGLLAEPQIAMFCGRLNMHMNVQNGKWDSDPSGTKTCIDTKEGILQYCQEVYPELQITNVVEANQPVTIQNWCKRGRKQCKTHPHFVIPYRCLVGEFVSDALLVPDKCKFLHQERMDVCETHLHWHTVAKETCSEKSTNLHDYGMLLPCGIDKFRGVEFVCCPLAEESDNVDSADAEEDDSDVWWGGADTDYADGSEDKVVEVAEEEEVAEVEEEEADDDEDDEDGDEVEEEAEEPYEEATERTTSIATTTTTTTESVEEVVREVCSEQAETGPCRAMISRWYFDVTEGKCAPFFYGGCGGNRNNFDTEEYCMAVCGSAIPTTAASTPDAVDKYLETPGDENEHAHFQKAKERLEAKHRERMSQVMREWEEAERQAKNLPKADKKAVIQHFQEKVESLEQEAANERQQLVETHMARVEAMLNDRRRLALENYITALQAVPPRPRHVFNMLKKYVRAEQKDRQHTLKHFEHVRMVDPKKAAQIRSQVMTHLRVIYERMNQSLSLLYNVPAVAEEIQDEVDELLQKEQNYSDDVLANMISEPRISYGNDALMPSLTETKTTVELLPVNGEFSLDDLQPWHSFGADSVPANTENEVEPVDARPAADRGLTTRPGSGLTNIKTEEISEVKMDAEFRHDSGYEVHHQKLVFFAEDVGSNKGAIIGLMVGGVVIATVIVITLVMLKKKQYTSIHHGVVEVDAAVTPEERHLSKMQQNGYENPTYKFFEQMQN

SEQ ID NO: 19 - DNA, 3190 bp, Homo sapiens
  source 1..3190: mol_type = other DNA
gtcagtttcctcggcagcggtaggcgagagcacgcggaggagcgtgcgcgggggccccgggagacggcggcggtggcggcgcgggcagagcaaggacgcggcggatcccactcgcacagcagcgcactcggtgccccgcgcagggtcgcgatgctgcccggtttggcactgctcctgctggccgcctggacggctcgggcgctggaggtctaccctgaactgcagatcaccaatgtggtagaagccaaccaaccagtgaccatccagaactggtgcaagcggggccgcaagcagtgcaagacccatccccactttgtgattccctaccgctgcttagttggtgagtttgtaagtgatgcccttctcgttcctgacaagtgcaaattcttacaccaggagaggatggatgtttgcgaaactcatcttcactggcacaccgtcgccaaagagacatgcagtgagaagagtaccaacttgcatgactacggcatgttgctgccctgcggaattgacaagttccgaggggtagagtttgtgtgttgcccactggctgaagaaagtgacaatgtggattctgctgatgcggaggaggatgactcggatgtctggtggggcggagcagacacagactatgcagatgggagtgaagacaaagtagtagaagtagcagaggaggaagaagtggctgaggtggaagaagaagaagccgatgatgacgaggacgatgaggatggtgatgaggtagaggaagaggctgaggaaccctacgaagaagccacagagagaaccaccagcattgccaccaccaccaccaccaccacagagtctgtggaagaggtggttcgagttcctacaacagcagccagtacccctgatgccgttgacaagtatctcgagacacctggggatgagaatgaacatgcccatttccagaaagccaaagagaggcttgaggccaagcaccgagagagaatgtcccaggtcatgagagaatgggaagaggcagaacgtcaagcaaagaacttgcctaaagctgataagaaggcagttatccagcatttccaggagaaagtggaatctttggaacaggaagcagccaacgagagacagcagctggtggagacacacatggccagagtggaagccatgctcaatgaccgccgccgcctggccctggagaactacatcaccgctctgcaggctgttcctcctcggcctcgtcacgtgttcaatatgctaaagaagtatgtccgcgcagaacagaaggacagacagcacaccctaaagcatttcgagcatgtgcgcatggtggatcccaagaaagccgctcagatccggtcccaggttatgacacacctccgtgtgatttatgagcgcatgaatcagtctctctccctgctctacaacgtgcctgcagtggccgaggagattcaggatgaagttgatgagctgcttcagaaagagcaaaactattcagatgacgtcttggccaacatgattagtgaaccaaggatcagttacggaaacgatgctctcatgccatctttgaccgaaacgaaaaccaccgtggagctccttcccgtgaatggagagttcagcctggacgatctccagccgtggcattcttttggggctgactctgtgccagccaacacagaaaacgaagttgagcctgttgatgcccgccctgctgccgaccgaggactgaccactcgaccaggttctgggttgacaaatatcaagacggaggagatctctgaagtgaagatggatgcagaattccgacatgactcaggatatgaagttcatcatcaaaaattggtgttctttgcagaagatgtgggttcaaacaaaggtgcaatcattggactcatggtgggcggtgttgtcatagcgacagtgatcgtcatcaccttggtgatgctgaagaagaaacagtacacatccattcatcatggtgtggtggaggttgacgccgctgtcaccccagaggagcgccacctgtccaagatgcagcagaacggctacgaaaatccaacctacaagttctttgagcagatgcagaactagacccccgccacagcagcctctgaagttggacagcaaaaccattgcttcactacccatcggtgtccatttatagaataatgtgggaagaaacaaacccgttttatgatttactcattatcgccttttgacagctgtgctgtaacacaagtagatgcctgaacttgaattaatccacacatcagtaatgtattctatctctctttacattttggtctctatactacattattaatgggttttgtgtactgtaaagaatttagctgtatcaaactagtgcatgaatagattctctcctgattatttatcacatagccccttagccagttgtatattattcttgtggtttgtgacccaattaagtcctactttacatatgctttaagaatcgatgggggatgcttcatgtgaacgtgggagttcagctgcttctcttgcctaagtattcctttcctgatcactatgcattttaaagttaaacatttttaagtatttcagatgctttagagagattttttttccatgactgcattttactgtacagattgctgcttctgctatatttgtgatataggaattaagaggatacacacgtttgtttcttcgtgcctgttttatgtgcacacattaggcattgagacttcaagcttttctttttttgtccacgtatctttgggtctttgataaagaaaagaatccctgttcattgtaagcacttttacggggcgggtggggaggggtgctctgctggtcttcaattaccaagaattctccaaaacaattttctgcaggatgattgtacagaatcattgcttatgacatgatcgctttctacactgtattacataaataaattaaataaaataaccccgggcaagacttttctttgaaggatgactacagacattaaataatcgaagtaattttgggtggggagaagaggcagattcaattttctttaaccagtctgaagtttcatttatgatacaaaagaagatgaaaatggaagtggcaatataaggggatgaggaaggcatgcctggacaaacccttcttttaagatgtgtcttcaatttgtataaaatggtgttttcatgtaaataaatacattcttggaggagca

SEQ ID NO: 20 - DNA, 3190 bp, synthetic construct
  misc_feature 1..3190: note = Synthetic
  source 1..3190: mol_type = other DNA
tgctcctccaagaatgtatttatttacatgaaaacaccattttatacaaattgaagacacatcttaaaagaagggtttgtccaggcatgccttcctcatccccttatattgccacttccattttcatcttcttttgtatcataaatgaaacttcagactggttaaagaaaattgaatctgcctcttctccccacccaaaattacttcgattatttaatgtctgtagtcatccttcaaagaaaagtcttgcccggggttattttatttaatttatttatgtaatacagtgtagaaagcgatcatgtcataagcaatgattctgtacaatcatcctgcagaaaattgttttggagaattcttggtaattgaagaccagcagagcacccctccccacccgccccgtaaaagtgcttacaatgaacagggattcttttctttatcaaagacccaaagatacgtggacaaaaaaagaaaagcttgaagtctcaatgcctaatgtgtgcacataaaacaggcacgaagaaacaaacgtgtgtatcctcttaattcctatatcacaaatatagcagaagcagcaatctgtacagtaaaatgcagtcatggaaaaaaaatctctctaaagcatctgaaatacttaaaaatgtttaactttaaaatgcatagtgatcaggaaaggaatacttaggcaagagaagcagctgaactcccacgttcacatgaagcatcccccatcgattcttaaagcatatgtaaagtaggacttaattgggtcacaaaccacaagaataatatacaactggctaaggggctatgtgataaataatcaggagagaatctattcatgcactagtttgatacagctaaattctttacagtacacaaaacccattaataatgtagtatagagaccaaaatgtaaagagagatagaatacattactgatgtgtggattaattcaagttcaggcatctacttgtgttacagcacagctgtcaaaaggcgataatgagtaaatcataaaacgggtttgtttcttcccacattattctataaatggacaccgatgggtagtgaagcaatggttttgctgtccaacttcagaggctgctgtggcgggggtctagttctgcatctgctcaaagaacttgtaggttggattttcgtagccgttctgctgcatcttggacaggtggcgctcctctggggtgacagcggcgtcaacctccaccacaccatgatgaatggatgtgtactgtttcttcttcagcatcaccaaggtgatgacgatcactgtcgctatgacaacaccgcccaccatgagtccaatgattgcacctttgtttgaacccacatcttctgcaaagaacaccaatttttgatgatgaacttcatatcctgagtcatgtcggaattctgcatccatcttcacttcagagatctcctccgtcttgatatttgtcaacccagaacctggtcgagtggtcagtcctcggtcggcagcagggcgggcatcaacaggctcaacttcgttttctgtgttggctggcacagagtcagccccaaaagaatgccacggctggagatcgtccaggctgaactctccattcacgggaaggagctccacggtggttttcgtttcggtcaaagatggcatgagagcatcgtttccgtaactgatccttggttcactaatcatgttggccaagacgtcatctgaatagttttgctctttctgaagcagctcatcaacttcatcctgaatctcctcggccactgcaggcacgttgtagagcagggagagagactgattcatgcgctcataaatcacacggaggtgtgtcataacctgggaccggatctgagcggctttcttgggatccaccatgcgcacatgctcgaaatgctttagggtgtgctgtctgtccttctgttctgcgcggacatacttctttagcatattgaacacgtgacgaggccgaggaggaacagcctgcagagcggtgatgtagttctccagggccaggcggcggcggtcattgagcatggcttccactctggccatgtgtgtctccaccagctgctgtctctcgttggctgcttcctgttccaaagattccactttctcctggaaatgctggataactgccttcttatcagctttaggcaagttctttgcttgacgttctgcctcttcccattctctcatgacctgggacattctctctcggtgcttggcctcaagcctctctttggctttctggaaatgggcatgttcattctcatccccaggtgtctcgagatacttgtcaacggcatcaggggtactggctgctgttgtaggaactcgaaccacctcttccacagactctgtggtggtggtggtggtggtggcaatgctggtggttctctctgtggcttcttcgtagggttcctcagcctcttcctctacctcatcaccatcctcatcgtcctcgtcatcatcggcttcttcttcttccacctcagccacttcttcctcctctgctacttctactactttgtcttcactcccatctgcatagtctgtgtctgctccgccccaccagacatccgagtcatcctcctccgcatcagcagaatccacattgtcactttcttcagccagtgggcaacacacaaactctacccctcggaacttgtcaattccgcagggcagcaacatgccgtagtcatgcaagttggtactcttctcactgcatgtctctttggcgacggtgtgccagtgaagatgagtttcgcaaacatccatcctctcctggtgtaagaatttgcacttgtcaggaacgagaagggcatcacttacaaactcaccaactaagcagcggtagggaatcacaaagtggggatgggtcttgcactgcttgcggccccgcttgcaccagttctggatggtcactggttggttggcttctaccacattggtgatctgcagttcagggtagacctccagcgcccgagccgtccaggcggccagcaggagcagtgccaaaccgggcagcatcgcgaccctgcgcggggcaccgagtgcgctgctgtgcgagtgggatccgccgcgtccttgctctgcccgcgccgccaccgccgccgtctcccggggcccccgcgcacgctcctccgcgtgctctcgcctaccgctgccgaggaaactgac

SEQ ID NO: 21 - protein, 639 aa, Homo sapiens
MLPGLALLLLAAWTARALEVYPELQITNVVEANQPVTIQNWCKRGRKQCKTHPHFVIPYRCLVGEFVSDALLVPDKCKFLHQERMDVCETHLHWHTVAKETCSEKSTNLHDYGMLLPCGIDKFRGVEFVCCPLAEESDNVDSADAEEDDSDVWWGGADTDYADGSEDKVVEVAEEEEVAEVEEEEADDDEDDEDGDEVEEEAEEPYEEATERTTSIATTTTTTTESVEEVVRVPTTAASTPDAVDKYLETPGDENEHAHFQKAKERLEAKHRERMSQVMREWEEAERQAKNLPKADKKAVIQHFQEKVESLEQEAANERQQLVETHMARVEAMLNDRRRLALENYITALQAVPPRPRHVFNMLKKYVRAEQKDRQHTLKHFEHVRMVDPKKAAQIRSQVMTHLRVIYERMNQSLSLLYNVPAVAEEIQDEVDELLQKEQNYSDDVLANMISEPRISYGNDALMPSLTETKTTVELLPVNGEFSLDDLQPWHSFGADSVPANTENEVEPVDARPAADRGLTTRPGSGLTNIKTEEISEVKMDAEFRHDSGYEVHHQKLVFFAEDVGSNKGAIIGLMVGGVVIATVIVITLVMLKKKQYTSIHHGVVEVDAAVTPEERHLSKMQQNGYENPTYKFFEQMQN

SEQ ID NO: 22 - DNA, 3415 bp, Homo sapiens
  source 1..3415: mol_type = other DNA
gtcagtttcctcggcagcggtaggcgagagcacgcggaggagcgtgcgcgggggccccgggagacggcggcggtggcggcgcgggcagagcaaggacgcggcggatcccactcgcacagcagcgcactcggtgccccgcgcagggtcgcgatgctgcccggtttggcactgctcctgctggccgcctggacggctcgggcgctggaggtctaccctgaactgcagatcaccaatgtggtagaagccaaccaaccagtgaccatccagaactggtgcaagcggggccgcaagcagtgcaagacccatccccactttgtgattccctaccgctgcttagttggtgagtttgtaagtgatgcccttctcgttcctgacaagtgcaaattcttacaccaggagaggatggatgtttgcgaaactcatcttcactggcacaccgtcgccaaagagacatgcagtgagaagagtaccaacttgcatgactacggcatgttgctgccctgcggaattgacaagttccgaggggtagagtttgtgtgttgcccactggctgaagaaagtgacaatgtggattctgctgatgcggaggaggatgactcggatgtctggtggggcggagcagacacagactatgcagatgggagtgaagacaaagtagtagaagtagcagaggaggaagaagtggctgaggtggaagaagaagaagccgatgatgacgaggacgatgaggatggtgatgaggtagaggaagaggctgaggaaccctacgaagaagccacagagagaaccaccagcattgccaccaccaccaccaccaccacagagtctgtggaagaggtggttcgagaggtgtgctctgaacaagccgagacggggccgtgccgagcaatgatctcccgctggtactttgatgtgactgaagggaagtgtgccccattcttttacggcggatgtggcggcaaccggaacaactttgacacagaagagtactgcatggccgtgtgtggcagcgccatgtcccaaagtttactcaagactacccaggaacctcttgcccgagatcctgttaaacttcctacaacagcagccagtacccctgatgccgttgacaagtatctcgagacacctggggatgagaatgaacatgcccatttccagaaagccaaagagaggcttgaggccaagcaccgagagagaatgtcccaggtcatgagagaatgggaagaggcagaacgtcaagcaaagaacttgcctaaagctgataagaaggcagttatccagcatttccaggagaaagtggaatctttggaacaggaagcagccaacgagagacagcagctggtggagacacacatggccagagtggaagccatgctcaatgaccgccgccgcctggccctggagaactacatcaccgctctgcaggctgttcctcctcggcctcgtcacgtgttcaatatgctaaagaagtatgtccgcgcagaacagaaggacagacagcacaccctaaagcatttcgagcatgtgcgcatggtggatcccaagaaagccgctcagatccggtcccaggttatgacacacctccgtgtgatttatgagcgcatgaatcagtctctctccctgctctacaacgtgcctgcagtggccgaggagattcaggatgaagttgatgagctgcttcagaaagagcaaaactattcagatgacgtcttggccaacatgattagtgaaccaaggatcagttacggaaacgatgctctcatgccatctttgaccgaaacgaaaaccaccgtggagctccttcccgtgaatggagagttcagcctggacgatctccagccgtggcattcttttggggctgactctgtgccagccaacacagaaaacgaagttgagcctgttgatgcccgccctgctgccgaccgaggactgaccactcgaccaggttctgggttgacaaatatcaagacggaggagatctctgaagtgaagatggatgcagaattccgacatgactcaggatatgaagttcatcatcaaaaattggtgttctttgcagaagatgtgggttcaaacaaaggtgcaatcattggactcatggtgggcggtgttgtcatagcgacagtgatcgtcatcaccttggtgatgctgaagaagaaacagtacacatccattcatcatggtgtggtggaggttgacgccgctgtcaccccagaggagcgccacctgtccaagatgcagcagaacggctacgaaaatccaacctacaagttctttgagcagatgcagaactagacccccgccacagcagcctctgaagttggacagcaaaaccattgcttcactacccatcggtgtccatttatagaataatgtgggaagaaacaaacccgttttatgatttactcattatcgccttttgacagctgtgctgtaacacaagtagatgcctgaacttgaattaatccacacatcagtaatgtattctatctctctttacattttggtctctatactacattattaatgggttttgtgtactgtaaagaatttagctgtatcaaactagtgcatgaatagattctctcctgattatttatcacatagccccttagccagttgtatattattcttgtggtttgtgacccaattaagtcctactttacatatgctttaagaatcgatgggggatgcttcatgtgaacgtgggagttcagctgcttctcttgcctaagtattcctttcctgatcactatgcattttaaagttaaacatttttaagtatttcagatgctttagagagattttttttccatgactgcattttactgtacagattgctgcttctgctatatttgtgatataggaattaagaggatacacacgtttgtttcttcgtgcctgttttatgtgcacacattaggcattgagacttcaagcttttctttttttgtccacgtatctttgggtctttgataaagaaaagaatccctgttcattgtaagcacttttacggggcgggtggggaggggtgctctgctggtcttcaattaccaagaattctccaaaacaattttctgcaggatgattgtacagaatcattgcttatgacatgatcgctttctacactgtattacataaataaattaaataaaataaccccgggcaagacttttctttgaaggatgactacagacattaaataatcgaagtaattttgggtggggagaagaggcagattcaattttctttaaccagtctgaagtttcatttatgatacaaaagaagatgaaaatggaagtggcaatataaggggatgaggaaggcatgcctggacaaacccttcttttaagatgtgtcttcaatttgtataaaatggtgttttcatgtaaataaatacattcttggaggagca

SEQ ID NO: 23 - DNA, 3415 bp, synthetic construct
  misc_feature 1..3415: note = Synthetic
  source 1..3415: mol_type = other DNA
tgctcctccaagaatgtatttatttacatgaaaacaccattttatacaaattgaagacacatcttaaaagaagggtttgtccaggcatgccttcctcatccccttatattgccacttccattttcatcttcttttgtatcataaatgaaacttcagactggttaaagaaaattgaatctgcctcttctccccacccaaaattacttcgattatttaatgtctgtagtcatccttcaaagaaaagtcttgcccggggttattttatttaatttatttatgtaatacagtgtagaaagcgatcatgtcataagcaatgattctgtacaatcatcctgcagaaaattgttttggagaattcttggtaattgaagaccagcagagcacccctccccacccgccccgtaaaagtgcttacaatgaacagggattcttttctttatcaaagacccaaagatacgtggacaaaaaaagaaaagcttgaagtctcaatgcctaatgtgtgcacataaaacaggcacgaagaaacaaacgtgtgtatcctcttaattcctatatcacaaatatagcagaagcagcaatctgtacagtaaaatgcagtcatggaaaaaaaatctctctaaagcatctgaaatacttaaaaatgtttaactttaaaatgcatagtgatcaggaaaggaatacttaggcaagagaagcagctgaactcccacgttcacatgaagcatcccccatcgattcttaaagcatatgtaaagtaggacttaattgggtcacaaaccacaagaataatatacaactggctaaggggctatgtgataaataatcaggagagaatctattcatgcactagtttgatacagctaaattctttacagtacacaaaacccattaataatgtagtatagagaccaaaatgtaaagagagatagaatacattactgatgtgtggattaattcaagttcaggcatctacttgtgttacagcacagctgtcaaaaggcgataatgagtaaatcataaaacgggtttgtttcttcccacattattctataaatggacaccgatgggtagtgaagcaatggttttgctgtccaacttcagaggctgctgtggcgggggtctagttctgcatctgctcaaagaacttgtaggttggattttcgtagccgttctgctgcatcttggacaggtggcgctcctctggggtgacagcggcgtcaacctccaccacaccatgatgaatggatgtgtactgtttcttcttcagcatcaccaaggtgatgacgatcactgtcgctatgacaacaccgcccaccatgagtccaatgattgcacctttgtttgaacccacatcttctgcaaagaacaccaatttttgatgatgaacttcatatcctgagtcatgtcggaattctgcatccatcttcacttcagagatctcctccgtcttgatatttgtcaacccagaacctggtcgagtggtcagtcctcggtcggcagcagggcgggcatcaacaggctcaacttcgttttctgtgttggctggcacagagtcagccccaaaagaatgccacggctggagatcgtccaggctgaactctccattcacgggaaggagctccacggtggttttcgtttcggtcaaagatggcatgagagcatcgtttccgtaactgatccttggttcactaatcatgttggccaagacgtcatctgaatagttttgctctttctgaagcagctcatcaacttcatcctgaatctcctcggccactgcaggcacgttgtagagcagggagagagactgattcatgcgctcataaatcacacggaggtgtgtcataacctgggaccggatctgagcggctttcttgggatccaccatgcgcacatgctcgaaatgctttagggtgtgctgtctgtccttctgttctgcgcggacatacttctttagcatattgaacacgtgacgaggccgaggaggaacagcctgcagagcggtgatgtagttctccagggccaggcggcggcggtcattgagcatggcttccactctggccatgtgtgtctccaccagctgctgtctctcgttggctgcttcctgttccaaagattccactttctcctggaaatgctggataactgccttcttatcagctttaggcaagttctttgcttgacgttctgcctcttcccattctctcatgacctgggacattctctctcggtgcttggcctcaagcctctctttggctttctggaaatgggcatgttcattctcatccccaggtgtctcgagatacttgtcaacggcatcaggggtactggctgctgttgtaggaagtttaacaggatctcgggcaagaggttcctgggtagtcttgagtaaactttgggacatggcgctgccacacacggccatgcagtactcttctgtgtcaaagttgttccggttgccgccacatccgccgtaaaagaatggggcacacttcccttcagtcacatcaaagtaccagcgggagatcattgctcggcacggccccgtctcggcttgttcagagcacacctctcgaaccacctcttccacagactctgtggtggtggtggtggtggtggcaatgctggtggttctctctgtggcttcttcgtagggttcctcagcctcttcctctacctcatcaccatcctcatcgtcctcgtcatcatcggcttcttcttcttccacctcagccacttcttcctcctctgctacttctactactttgtcttcactcccatctgcatagtctgtgtctgctccgccccaccagacatccgagtcatcctcctccgcatcagcagaatccacattgtcactttcttcagccagtgggcaacacacaaactctacccctcggaacttgtcaattccgcagggcagcaacatgccgtagtcatgcaagttggtactcttctcactgcatgtctctttggcgacggtgtgccagtgaagatgagtttcgcaaacatccatcctctcctggtgtaagaatttgcacttgtcaggaacgagaagggcatcacttacaaactcaccaactaagcagcggtagggaatcacaaagtggggatgggtcttgcactgcttgcggccccgcttgcaccagttctggatggtcactggttggttggcttctaccacattggtgatctgcagttcagggtagacctccagcgcccgagccgtccaggcggccagcaggagcagtgccaaaccgggcagcatcgcgaccctgcgcggggcaccgagtgcgctgctgtgcgagtgggatccgccgcgtccttgctctgcccgcgccgccaccgccgccgtctcccggggcccccgcgcacgctcctccgcgtgctctcgcctaccgctgccgaggaaactgac

SEQ ID NO: 24 - protein, 714 aa, Homo sapiens
MLPGLALLLLAAWTARALEVYPELQITNVVEANQPVTIQNWCKRGRKQCKTHPHFVIPYRCLVGEFVSDALLVPDKCKFLHQERMDVCETHLHWHTVAKETCSEKSTNLHDYGMLLPCGIDKFRGVEFVCCPLAEESDNVDSADAEEDDSDVWWGGADTDYADGSEDKVVEVAEEEEVAEVEEEEADDDEDDEDGDEVEEEAEEPYEEATERTTSIATTTTTTTESVEEVVREVCSEQAETGPCRAMISRWYFDVTEGKCAPFFYGGCGGNRNNFDTEEYCMAVCGSAMSQSLLKTTQEPLARDPVKLPTTAASTPDAVDKYLETPGDENEHAHFQKAKERLEAKHRERMSQVMREWEEAERQAKNLPKADKKAVIQHFQEKVESLEQEAANERQQLVETHMARVEAMLNDRRRLALENYITALQAVPPRPRHVFNMLKKYVRAEQKDRQHTLKHFEHVRMVDPKKAAQIRSQVMTHLRVIYERMNQSLSLLYNVPAVAEEIQDEVDELLQKEQNYSDDVLANMISEPRISYGNDALMPSLTETKTTVELLPVNGEFSLDDLQPWHSFGADSVPANTENEVEPVDARPAADRGLTTRPGSGLTNIKTEEISEVKMDAEFRHDSGYEVHHQKLVFFAEDVGSNKGAIIGLMVGGVVIATVIVITLVMLKKKQYTSIHHGVVEVDAAVTPEERHLSKMQQNGYENPTYKFFEQMQN

SEQ ID NO: 25 - DNA, 3295 bp, Homo sapiens
  source 1..3295: mol_type = other DNA
gtcggatgattcaagctcacggggacgagcaggagcgctctcgacttttctagagcctcagcgtcctaggactcacctttccctgatcctgcaccgtccctctcctggccccagactctccctcccactgttcacgaagcccaggtacccactgatggtaatgctggcctgctggctgaaccccagattgccatgttctgtggcagactgaacatgcacatgaatgtccagaatgggaagtgggattcagatccatcagggaccaaaacctgcattgataccaaggaaggcatcctgcagtattgccaagaagtctaccctgaactgcagatcaccaatgtggtagaagccaaccaaccagtgaccatccagaactggtgcaagcggggccgcaagcagtgcaagacccatccccactttgtgattccctaccgctgcttagttggtgagtttgtaagtgatgcccttctcgttcctgacaagtgcaaattcttacaccaggagaggatggatgtttgcgaaactcatcttcactggcacaccgtcgccaaagagacatgcagtgagaagagtaccaacttgcatgactacggcatgttgctgccctgcggaattgacaagttccgaggggtagagtttgtgtgttgcccactggctgaagaaagtgacaatgtggattctgctgatgcggaggaggatgactcggatgtctggtggggcggagcagacacagactatgcagatgggagtgaagacaaagtagtagaagtagcagaggaggaagaagtggctgaggtggaagaagaagaagccgatgatgacgaggacgatgaggatggtgatgaggtagaggaagaggctgaggaaccctacgaagaagccacagagagaaccaccagcattgccaccaccaccaccaccaccacagagtctgtggaagaggtggttcgagttcctacaacagcagccagtacccctgatgccgttgacaagtatctcgagacacctggggatgagaatgaacatgcccatttccagaaagccaaagagaggcttgaggccaagcaccgagagagaatgtcccaggtcatgagagaatgggaagaggcagaacgtcaagcaaagaacttgcctaaagctgataagaaggcagttatccagcatttccaggagaaagtggaatctttggaacaggaagcagccaacgagagacagcagctggtggagacacacatggccagagtggaagccatgctcaatgaccgccgccgcctggccctggagaactacatcaccgctctgcaggctgttcctcctcggcctcgtcacgtgttcaatatgctaaagaagtatgtccgcgcagaacagaaggacagacagcacaccctaaagcatttcgagcatgtgcgcatggtggatcccaagaaagccgctcagatccggtcccaggttatgacacacctccgtgtgatttatgagcgcatgaatcagtctctctccctgctctacaacgtgcctgcagtggccgaggagattcaggatgaagttgatgagctgcttcagaaagagcaaaactattcagatgacgtcttggccaacatgattagtgaaccaaggatcagttacggaaacgatgctctcatgccatctttgaccgaaacgaaaaccaccgtggagctccttcccgtgaatggagagttcagcctggacgatctccagccgtggcattcttttggggctgactctgtgccagccaacacagaaaacgaagttgagcctgttgatgcccgccctgctgccgaccgaggactgaccactcgaccaggttctgggttgacaaatatcaagacggaggagatctctgaagtgaagatggatgcagaattccgacatgactcaggatatgaagttcatcatcaaaaattggtgttctttgcagaagatgtgggttcaaacaaaggtgcaatcattggactcatggtgggcggtgttgtcatagcgacagtgatcgtcatcaccttggtgatgctgaagaagaaacagtacacatccattcatcatggtgtggtggaggttgacgccgctgtcaccccagaggagcgccacctgtccaagatgcagcagaacggctacgaaaatccaacctacaagttctttgagcagatgcagaactagacccccgccacagcagcctctgaagttggacagcaaaaccattgcttcactacccatcggtgtccatttatagaataatgtgggaagaaacaaacccgttttatgatttactcattatcgccttttgacagctgtgctgtaacacaagtagatgcctgaacttgaattaatccacacatcagtaatgtattctatctctctttacattttggtctctatactacattattaatgggttttgtgtactgtaaagaatttagctgtatcaaactagtgcatgaatagattctctcctgattatttatcacatagccccttagccagttgtatattattcttgtggtttgtgacccaattaagtcctactttacatatgctttaagaatcgatgggggatgcttcatgtgaacgtgggagttcagctgcttctcttgcctaagtattcctttcctgatcactatgcattttaaagttaaacatttttaagtatttcagatgctttagagagattttttttccatgactgcattttactgtacagattgctgcttctgctatatttgtgatataggaattaagaggatacacacgtttgtttcttcgtgcctgttttatgtgcacacattaggcattgagacttcaagcttttctttttttgtccacgtatctttgggtctttgataaagaaaagaatccctgttcattgtaagcacttttacggggcgggtggggaggggtgctctgctggtcttcaattaccaagaattctccaaaacaattttctgcaggatgattgtacagaatcattgcttatgacatgatcgctttctacactgtattacataaataaattaaataaaataaccccgggcaagacttttctttgaaggatgactacagacattaaataatcgaagtaattttgggtggggagaagaggcagattcaattttctttaaccagtctgaagtttcatttatgatacaaaagaagatgaaaatggaagtggcaatataaggggatgaggaaggcatgcctggacaaacccttcttttaagatgtgtcttcaatttgtataaaatggtgttttcatgtaaataaatacattcttggaggagca

SEQ ID NO: 26 - DNA, 3295 bp, synthetic construct
  misc_feature 1..3295: note = Synthetic
  source 1..3295: mol_type = other DNA
tgctcctccaagaatgtatttatttacatgaaaacaccattttatacaaattgaagacacatcttaaaagaagggtttgtccaggcatgccttcctcatccccttatattgccacttccattttcatcttcttttgtatcataaatgaaacttcagactggttaaagaaaattgaatctgcctcttctccccacccaaaattacttcgattatttaatgtctgtagtcatccttcaaagaaaagtcttgcccggggttattttatttaatttatttatgtaatacagtgtagaaagcgatcatgtcataagcaatgattctgtacaatcatcctgcagaaaattgttttggagaattcttggtaattgaagaccagcagagcacccctccccacccgccccgtaaaagtgcttacaatgaacagggattcttttctttatcaaagacccaaagatacgtggacaaaaaaagaaaagcttgaagtctcaatgcctaatgtgtgcacataaaacaggcacgaagaaacaaacgtgtgtatcctcttaattcctatatcacaaatatagcagaagcagcaatctgtacagtaaaatgcagtcatggaaaaaaaatctctctaaagcatctgaaatacttaaaaatgtttaactttaaaatgcatagtgatcaggaaaggaatacttaggcaagagaagcagctgaactcccacgttcacatgaagcatcccccatcgattcttaaagcatatgtaaagtaggacttaattgggtcacaaaccacaagaataatatacaactggctaaggggctatgtgataaataatcaggagagaatctattcatgcactagtttgatacagctaaattctttacagtacacaaaacccattaataatgtagtatagagaccaaaatgtaaagagagatagaatacattactgatgtgtggattaattcaagttcaggcatctacttgtgttacagcacagctgtcaaaaggcgataatgagtaaatcataaaacgggtttgtttcttcccacattattctataaatggacaccgatgggtagtgaagcaatggttttgctgtccaacttcagaggctgctgtggcgggggtctagttctgcatctgctcaaagaacttgtaggttggattttcgtagccgttctgctgcatcttggacaggtggcgctcctctggggtgacagcggcgtcaacctccaccacaccatgatgaatggatgtgtactgtttcttcttcagcatcaccaaggtgatgacgatcactgtcgctatgacaacaccgcccaccatgagtccaatgattgcacctttgtttgaacccacatcttctgcaaagaacaccaatttttgatgatgaacttcatatcctgagtcatgtcggaattctgcatccatcttcacttcagagatctcctccgtcttgatatttgtcaacccagaacctggtcgagtggtcagtcctcggtcggcagcagggcgggcatcaacaggctcaacttcgttttctgtgttggctggcacagagtcagccccaaaagaatgccacggctggagatcgtccaggctgaactctccattcacgggaaggagctccacggtggttttcgtttcggtcaaagatggcatgagagcatcgtttccgtaactgatccttggttcactaatcatgttggccaagacgtcatctgaatagttttgctctttctgaagcagctcatcaacttcatcctgaatctcctcggccactgcaggcacgttgtagagcagggagagagactgattcatgcgctcataaatcacacggaggtgtgtcataacctgggaccggatctgagcggctttcttgggatccaccatgcgcacatgctcgaaatgctttagggtgtgctgtctgtccttctgttctgcgcggacatacttctttagcatattgaacacgtgacgaggccgaggaggaacagcctgcagagcggtgatgtagttctccagggccaggcggcggcggtcattgagcatggcttccactctggccatgtgtgtctccaccagctgctgtctctcgttggctgcttcctgttccaaagattccactttctcctggaaatgctggataactgccttcttatcagctttaggcaagttctttgcttgacgttctgcctcttcccattctctcatgacctgggacattctctctcggtgcttggcctcaagcctctctttggctttctggaaatgggcatgttcattctcatccccaggtgtctcgagatacttgtcaacggcatcaggggtactggctgctgttgtaggaactcgaaccacctcttccacagactctgtggtggtggtggtggtggtggcaatgctggtggttctctctgtggcttcttcgtagggttcctcagcctcttcctctacctcatcaccatcctcatcgtcctcgtcatcatcggcttcttcttcttccacctcagccacttcttcctcctctgctacttctactactttgtcttcactcccatctgcatagtctgtgtctgctccgccccaccagacatccgagtcatcctcctccgcatcagcagaatccacattgtcactttcttcagccagtgggcaacacacaaactctacccctcggaacttgtcaattccgcagggcagcaacatgccgtagtcatgcaagttggtactcttctcactgcatgtctctttggcgacggtgtgccagtgaagatgagtttcgcaaacatccatcctctcctggtgtaagaatttgcacttgtcaggaacgagaagggcatcacttacaaactcaccaactaagcagcggtagggaatcacaaagtggggatgggtcttgcactgcttgcggccccgcttgcaccagttctggatggtcactggttggttggcttctaccacattggtgatctgcagttcagggtagacttcttggcaatactgcaggatgccttccttggtatcaatgcaggttttggtccctgatggatctgaatcccacttcccattctggacattcatgtgcatgttcagtctgccacagaacatggcaatctggggttcagccagcaggccagcattaccatcagtgggtacctgggcttcgtgaacagtgggagggagagtctggggccaggagagggacggtgcaggatcagggaaaggtgagtcctaggacgctgaggctctagaaaagtcgagagcgctcctgctcgtccccgtgagcttgaatcatccgac

SEQ ID NO: 27 - protein, 660 aa, Homo sapiens
MFCGRLNMHMNVQNGKWDSDPSGTKTCIDTKEGILQYCQEVYPELQITNVVEANQPVTIQNWCKRGRKQCKTHPHFVIPYRCLVGEFVSDALLVPDKCKFLHQERMDVCETHLHWHTVAKETCSEKSTNLHDYGMLLPCGIDKFRGVEFVCCPLAEESDNVDSADAEEDDSDVWWGGADTDYADGSEDKVVEVAEEEEVAEVEEEEADDDEDDEDGDEVEEEAEEPYEEATERTTSIATTTTTTTESVEEVVRVPTTAASTPDAVDKYLETPGDENEHAHFQKAKERLEAKHRERMSQVMREWEEAERQAKNLPKADKKAVIQHFQEKVESLEQEAANERQQLVETHMARVEAMLNDRRRLALENYITALQAVPPRPRHVFNMLKKYVRAEQKDRQHTLKHFEHVRMVDPKKAAQIRSQVMTHLRVIYERMNQSLSLLYNVPAVAEEIQDEVDELLQKEQNYSDDVLANMISEPRISYGNDALMPSLTETKTTVELLPVNGEFSLDDLQPWHSFGADSVPANTENEVEPVDARPAADRGLTTRPGSGLTNIKTEEISEVKMDAEFRHDSGYEVHHQKLVFFAEDVGSNKGAIIGLMVGGVVIATVIVITLVMLKKKQYTSIHHGVVEVDAAVTPEERHLSKMQQNGYENPTYKFFEQMQN

SEQ ID NO: 28 - DNA, 3529 bp, Homo sapiens
  source 1..3529: mol_type = other DNA
gtcagtttcctcggcagcggtaggcgagagcacgcggaggagcgtgcgcgggggccccgggagacggcggcggtggcggcgcgggcagagcaaggacgcggcggatcccactcgcacagcagcgcactcggtgccccgcgcagggtcgcgatgctgcccggtttggcactgctcctgctggccgcctggacggctcgggcgctggaggtacccactgatggtaatgctggcctgctggctgaaccccagattgccatgttctgtggcagactgaacatgcacatgaatgtccagaatgggaagtgggattcagatccatcagggaccaaaacctgcattgataccaaggaaggcatcctgcagtattgccaagaagtctaccctgaactgcagatcaccaatgtggtagaagccaaccaaccagtgaccatccagaactggtgcaagcggggccgcaagcagtgcaagacccatccccactttgtgattccctaccgctgcttagttggtgagtttgtaagtgatgcccttctcgttcctgacaagtgcaaattcttacaccaggagaggatggatgtttgcgaaactcatcttcactggcacaccgtcgccaaagagacatgcagtgagaagagtaccaacttgcatgactacggcatgttgctgccctgcggaattgacaagttccgaggggtagagtttgtgtgttgcccactggctgaagaaagtgacaatgtggattctgctgatgcggaggaggatgactcggatgtctggtggggcggagcagacacagactatgcagatgggagtgaagacaaagtagtagaagtagcagaggaggaagaagtggctgaggtggaagaagaagaagccgatgatgacgaggacgatgaggatggtgatgaggtagaggaagaggctgaggaaccctacgaagaagccacagagagaaccaccagcattgccaccaccaccaccaccaccacagagtctgtggaagaggtggttcgagaggtgtgctctgaacaagccgagacggggccgtgccgagcaatgatctcccgctggtactttgatgtgactgaagggaagtgtgccccattcttttacggcggatgtggcggcaaccggaacaactttgacacagaagagtactgcatggccgtgtgtggcagcgccatgtcccaaagtttactcaagactacccaggaacctcttgcccgagatcctgttaaacttcctacaacagcagccagtacccctgatgccgttgacaagtatctcgagacacctggggatgagaatgaacatgcccatttccagaaagccaaagagaggcttgaggccaagcaccgagagagaatgtcccaggtcatgagagaatgggaagaggcagaacgtcaagcaaagaacttgcctaaagctgataagaaggcagttatccagcatttccaggagaaagtggaatctttggaacaggaagcagccaacgagagacagcagctggtggagacacacatggccagagtggaagccatgctcaatgaccgccgccgcctggccctggagaactacatcaccgctctgcaggctgttcctcctcggcctcgtcacgtgttcaatatgctaaagaagtatgtccgcgcagaacagaaggacagacagcacaccctaaagcatttcgagcatgtgcgcatggtggatcccaagaaagccgctcagatccggtcccaggttatgacacacctccgtgtgatttatgagcgcatgaatcagtctctctccctgctctacaacgtgcctgcagtggccgaggagattcaggatgaagttgatgagctgcttcagaaagagcaaaactattcagatgacgtcttggccaacatgattagtgaaccaaggatcagttacggaaacgatgctctcatgccatctttgaccgaaacgaaaaccaccgtggagctccttcccgtgaatggagagttcagcctggacgatctccagccgtggcattcttttggggctgactctgtgccagccaacacagaaaacgaaggttctgggttgacaaatatcaagacggaggagatctctgaagtgaagatggatgcagaattccgacatgactcaggatatgaagttcatcatcaaaaattggtgttctttgcagaagatgtgggttcaaacaaaggtgcaatcattggactcatggtgggcggtgttgtcatagcgacagtgatcgtcatcaccttggtgatgctgaagaagaaacagtacacatccattcatcatggtgtggtggaggttgacgccgctgtcaccccagaggagcgccacctgtccaagatgcagcagaacggctacgaaaatccaacctacaagttctttgagcagatgcagaactagacccccgccacagcagcctctgaagttggacagcaaaaccattgcttcactacccatcggtgtccatttatagaataatgtgggaagaaacaaacccgttttatgatttactcattatcgccttttgacagctgtgctgtaacacaagtagatgcctgaacttgaattaatccacacatcagtaatgtattctatctctctttacattttggtctctatactacattattaatgggttttgtgtactgtaaagaatttagctgtatcaaactagtgcatgaatagattctctcctgattatttatcacatagccccttagccagttgtatattattcttgtggtttgtgacccaattaagtcctactttacatatgctttaagaatcgatgggggatgcttcatgtgaacgtgggagttcagctgcttctcttgcctaagtattcctttcctgatcactatgcattttaaagttaaacatttttaagtatttcagatgctttagagagattttttttccatgactgcattttactgtacagattgctgcttctgctatatttgtgatataggaattaagaggatacacacgtttgtttcttcgtgcctgttttatgtgcacacattaggcattgagacttcaagcttttctttttttgtccacgtatctttgggtctttgataaagaaaagaatccctgttcattgtaagcacttttacggggcgggtggggaggggtgctctgctggtcttcaattaccaagaattctccaaaacaattttctgcaggatgattgtacagaatcattgcttatgacatgatcgctttctacactgtattacataaataaattaaataaaataaccccgggcaagacttttctttgaaggatgactacagacattaaataatcgaagtaattttgggtggggagaagaggcagattcaattttctttaaccagtctgaagtttcatttatgatacaaaagaagatgaaaatggaagtggcaatataaggggatgaggaaggcatgcctggacaaacccttcttttaagatgtgtcttcaatttgtataaaatggtgttttcatgtaaataaatacattcttggaggagca

SEQ ID NO: 29 - DNA, 3529 bp, synthetic construct
  misc_feature 1..3529: note = Synthetic
  source 1..3529: mol_type = other DNA
tgctcctccaagaatgtatttatttacatgaaaacaccattttatacaaattgaagacacatcttaaaagaagggtttgtccaggcatgccttcctcatccccttatattgccacttccattttcatcttcttttgtatcataaatgaaacttcagactggttaaagaaaattgaatctgcctcttctccccacccaaaattacttcgattatttaatgtctgtagtcatccttcaaagaaaagtcttgcccggggttattttatttaatttatttatgtaatacagtgtagaaagcgatcatgtcataagcaatgattctgtacaatcatcctgcagaaaattgttttggagaattcttggtaattgaagaccagcagagcacccctccccacccgccccgtaaaagtgcttacaatgaacagggattcttttctttatcaaagacccaaagatacgtggacaaaaaaagaaaagcttgaagtctcaatgcctaatgtgtgcacataaaacaggcacgaagaaacaaacgtgtgtatcctcttaattcctatatcacaaatatagcagaagcagcaatctgtacagtaaaatgcagtcatggaaaaaaaatctctctaaagcatctgaaatacttaaaaatgtttaactttaaaatgcatagtgatcaggaaaggaatacttaggcaagagaagcagctgaactcccacgttcacatgaagcatcccccatcgattcttaaagcatatgtaaagtaggacttaattgggtcacaaaccacaagaataatatacaactggctaaggggctatgtgataaataatcaggagagaatctattcatgcactagtttgatacagctaaattctttacagtacacaaaacccattaataatgtagtatagagaccaaaatgtaaagagagatagaatacattactgatgtgtggattaattcaagttcaggcatctacttgtgttacagcacagctgtcaaaaggcgataatgagtaaatcataaaacgggtttgtttcttcccacattattctataaatggacaccgatgggtagtgaagcaatggttttgctgtccaacttcagaggctgctgtggcgggggtctagttctgcatctgctcaaagaacttgtaggttggattttcgtagccgttctgctgcatcttggacaggtggcgctcctctggggtgacagcggcgtcaacctccaccacaccatgatgaatggatgtgtactgtttcttcttcagcatcaccaaggtgatgacgatcactgtcgctatgacaacaccgcccaccatgagtccaatgattgcacctttgtttgaacccacatcttctgcaaagaacaccaatttttgatgatgaacttcatatcctgagtcatgtcggaattctgcatccatcttcacttcagagatctcctccgtcttgatatttgtcaacccagaaccttcgttttctgtgttggctggcacagagtcagccccaaaagaatgccacggctggagatcgtccaggctgaactctccattcacgggaaggagctccacggtggttttcgtttcggtcaaagatggcatgagagcatcgtttccgtaactgatccttggttcactaatcatgttggccaagacgtcatctgaatagttttgctctttctgaagcagctcatcaacttcatcctgaatctcctcggccactgcaggcacgttgtagagcagggagagagactgattcatgcgctcataaatcacacggaggtgtgtcataacctgggaccggatctgagcggctttcttgggatccaccatgcgcacatgctcgaaatgctttagggtgtgctgtctgtccttctgttctgcgcggacatacttctttagcatattgaacacgtgacgaggccgaggaggaacagcctgcagagcggtgatgtagttctccagggccaggcggcggcggtcattgagcatggcttccactctggccatgtgtgtctccaccagctgctgtctctcgttggctgcttcctgttccaaagattccactttctcctggaaatgctggataactgccttcttatcagctttaggcaagttctttgcttgacgttctgcctcttcccattctctcatgacctgggacattctctctcggtgcttggcctcaagcctctctttggctttctggaaatgggcatgttcattctcatccccaggtgtctcgagatacttgtcaacggcatcaggggtactggctgctgttgtaggaagtttaacaggatctcgggcaagaggttcctgggtagtcttgagtaaactttgggacatggcgctgccacacacggccatgcagtactcttctgtgtcaaagttgttccggttgccgccacatccgccgtaaaagaatggggcacacttcccttcagtcacatcaaagtaccagcgggagatcattgctcggcacggccccgtctcggcttgttcagagcacacctctcgaaccacctcttccacagactctgtggtggtggtggtggtggtggcaatgctggtggttctctctgtggcttcttcgtagggttcctcagcctcttcctctacctcatcaccatcctcatcgtcctcgtcatcatcggcttcttcttcttccacctcagccacttcttcctcctctgctacttctactactttgtcttcactcccatctgcatagtctgtgtctgctccgccccaccagacatccgagtcatcctcctccgcatcagcagaatccacattgtcactttcttcagccagtgggcaacacacaaactctacccctcggaacttgtcaattccgcagggcagcaacatgccgtagtcatgcaagttggtactcttctcactgcatgtctctttggcgacggtgtgccagtgaagatgagtttcgcaaacatccatcctctcctggtgtaagaatttgcacttgtcaggaacgagaagggcatcacttacaaactcaccaactaagcagcggtagggaatcacaaagtggggatgggtcttgcactgcttgcggccccgcttgcaccagttctggatggtcactggttggttggcttctaccacattggtgatctgcagttcagggtagacttcttggcaatactgcaggatgccttccttggtatcaatgcaggttttggtccctgatggatctgaatcccacttcccattctggacattcatgtgcatgttcagtctgccacagaacatggcaatctggggttcagccagcaggccagcattaccatcagtgggtacctccagcgcccgagccgtccaggcggccagcaggagcagtgccaaaccgggcagcatcgcgaccctgcgcggggcaccgagtgcgctgctgtgcgagtgggatccgccgcgtccttgctctgcccgcgccgccaccgccgccgtctcccggggcccccgcgcacgctcctccgcgtgctctcgcctaccgctgccgaggaaactgac

SEQ ID NO: 30 - protein, 752 aa, Homo sapiens
MLPGLALLLLAAWTARALEVPTDGNAGLLAEPQIAMFCGRLNMHMNVQNGKWDSDPSGTKTCIDTKEGILQYCQEVYPELQITNVVEANQPVTIQNWCKRGRKQCKTHPHFVIPYRCLVGEFVSDALLVPDKCKFLHQERMDVCETHLHWHTVAKETCSEKSTNLHDYGMLLPCGIDKFRGVEFVCCPLAEESDNVDSADAEEDDSDVWWGGADTDYADGSEDKVVEVAEEEEVAEVEEEEADDDEDDEDGDEVEEEAEEPYEEATERTTSIATTTTTTTESVEEVVREVCSEQAETGPCRAMISRWYFDVTEGKCAPFFYGGCGGNRNNFDTEEYCMAVCGSAMSQSLLKTTQEPLARDPVKLPTTAASTPDAVDKYLETPGDENEHAHFQKAKERLEAKHRERMSQVMREWEEAERQAKNLPKADKKAVIQHFQEKVESLEQEAANERQQLVETHMARVEAMLNDRRRLALENYITALQAVPPRPRHVFNMLKKYVRAEQKDRQHTLKHFEHVRMVDPKKAAQIRSQVMTHLRVIYERMNQSLSLLYNVPAVAEEIQDEVDELLQKEQNYSDDVLANMISEPRISYGNDALMPSLTETKTTVELLPVNGEFSLDDLQPWHSFGADSVPANTENEGSGLTNIKTEEISEVKMDAEFRHDSGYEVHHQKLVFFAEDVGSNKGAIIGLMVGGVVIATVIVITLVMLKKKQYTSIHHGVVEVDAAVTPEERHLSKMQQNGYENPTYKFFEQMQN

SEQ ID NO: 31 - DNA, 3472 bp, Homo sapiens
  source 1..3472: mol_type = other DNA
gtcagtttcctcggcagcggtaggcgagagcacgcggaggagcgtgcgcgggggccccgggagacggcggcggtggcggcgcgggcagagcaaggacgcggcggatcccactcgcacagcagcgcactcggtgccccgcgcagggtcgcgatgctgcccggtttggcactgctcctgctggccgcctggacggctcgggcgctggaggtacccactgatggtaatgctggcctgctggctgaaccccagattgccatgttctgtggcagactgaacatgcacatgaatgtccagaatgggaagtgggattcagatccatcagggaccaaaacctgcattgataccaaggaaggcatcctgcagtattgccaagaagtctaccctgaactgcagatcaccaatgtggtagaagccaaccaaccagtgaccatccagaactggtgcaagcggggccgcaagcagtgcaagacccatccccactttgtgattccctaccgctgcttagttggtgagtttgtaagtgatgcccttctcgttcctgacaagtgcaaattcttacaccaggagaggatggatgtttgcgaaactcatcttcactggcacaccgtcgccaaagagacatgcagtgagaagagtaccaacttgcatgactacggcatgttgctgccctgcggaattgacaagttccgaggggtagagtttgtgtgttgcccactggctgaagaaagtgacaatgtggattctgctgatgcggaggaggatgactcggatgtctggtggggcggagcagacacagactatgcagatgggagtgaagacaaagtagtagaagtagcagaggaggaagaagtggctgaggtggaagaagaagaagccgatgatgacgaggacgatgaggatggtgatgaggtagaggaagaggctgaggaaccctacgaagaagccacagagagaaccaccagcattgccaccaccaccaccaccaccacagagtctgtggaagaggtggttcgagaggtgtgctctgaacaagccgagacggggccgtgccgagcaatgatctcccgctggtactttgatgtgactgaagggaagtgtgccccattcttttacggcggatgtggcggcaaccggaacaactttgacacagaagagtactgcatggccgtgtgtggcagcgccattcctacaacagcagccagtacccctgatgccgttgacaagtatctcgagacacctggggatgagaatgaacatgcccatttccagaaagccaaagagaggcttgaggccaagcaccgagagagaatgtcccaggtcatgagagaatgggaagaggcagaacgtcaagcaaagaacttgcctaaagctgataagaaggcagttatccagcatttccaggagaaagtggaatctttggaacaggaagcagccaacgagagacagcagctggtggagacacacatggccagagtggaagccatgctcaatgaccgccgccgcctggccctggagaactacatcaccgctctgcaggctgttcctcctcggcctcgtcacgtgttcaatatgctaaagaagtatgtccgcgcagaacagaaggacagacagcacaccctaaagcatttcgagcatgtgcgcatggtggatcccaagaaagccgctcagatccggtcccaggttatgacacacctccgtgtgatttatgagcgcatgaatcagtctctctccctgctctacaacgtgcctgcagtggccgaggagattcaggatgaagttgatgagctgcttcagaaagagcaaaactattcagatgacgtcttggccaacatgattagtgaaccaaggatcagttacggaaacgatgctctcatgccatctttgaccgaaacgaaaaccaccgtggagctccttcccgtgaatggagagttcagcctggacgatctccagccgtggcattcttttggggctgactctgtgccagccaacacagaaaacgaaggttctgggttgacaaatatcaagacggaggagatctctgaagtgaagatggatgcagaattccgacatgactcaggatatgaagttcatcatcaaaaattggtgttctttgcagaagatgtgggttcaaacaaaggtgcaatcattggactcatggtgggcggtgttgtcatagcgacagtgatcgtcatcaccttggtgatgctgaagaagaaacagtacacatccattcatcatggtgtggtggaggttgacgccgctgtcaccccagaggagcgccacctgtccaagatgcagcagaacggctacgaaaatccaacctacaagttctttgagcagatgcagaactagacccccgccacagcagcctctgaagttggacagcaaaaccattgcttcactacccatcggtgtccatttatagaataatgtgggaagaaacaaacccgttttatgatttactcattatcgccttttgacagctgtgctgtaacacaagtagatgcctgaacttgaattaatccacacatcagtaatgtattctatctctctttacattttggtctctatactacattattaatgggttttgtgtactgtaaagaatttagctgtatcaaactagtgcatgaatagattctctcctgattatttatcacatagccccttagccagttgtatattattcttgtggtttgtgacccaattaagtcctactttacatatgctttaagaatcgatgggggatgcttcatgtgaacgtgggagttcagctgcttctcttgcctaagtattcctttcctgatcactatgcattttaaagttaaacatttttaagtatttcagatgctttagagagattttttttccatgactgcattttactgtacagattgctgcttctgctatatttgtgatataggaattaagaggatacacacgtttgtttcttcgtgcctgttttatgtgcacacattaggcattgagacttcaagcttttctttttttgtccacgtatctttgggtctttgataaagaaaagaatccctgttcattgtaagcacttttacggggcgggtggggaggggtgctctgctggtcttcaattaccaagaattctccaaaacaattttctgcaggatgattgtacagaatcattgcttatgacatgatcgctttctacactgtattacataaataaattaaataaaataaccccgggcaagacttttctttgaaggatgactacagacattaaataatcgaagtaattttgggtggggagaagaggcagattcaattttctttaaccagtctgaagtttcatttatgatacaaaagaagatgaaaatggaagtggcaatataaggggatgaggaaggcatgcctggacaaacccttcttttaagatgtgtcttcaatttgtataaaatggtgttttcatgtaaataaatacattcttggaggagca

SEQ ID NO: 32 - DNA, 3472 bp, synthetic construct
  misc_feature 1..3472: note = Synthetic
  source 1..3472: mol_type = other DNA
tgctcctccaagaatgtatttatttacatgaaaacaccattttatacaaattgaagacacatcttaaaagaagggtttgtccaggcatgccttcctcatccccttatattgccacttccattttcatcttcttttgtatcataaatgaaacttcagactggttaaagaaaattgaatctgcctcttctccccacccaaaattacttcgattatttaatgtctgtagtcatccttcaaagaaaagtcttgcccggggttattttatttaatttatttatgtaatacagtgtagaaagcgatcatgtcataagcaatgattctgtacaatcatcctgcagaaaattgttttggagaattcttggtaattgaagaccagcagagcacccctccccacccgccccgtaaaagtgcttacaatgaacagggattcttttctttatcaaagacccaaagatacgtggacaaaaaaagaaaagcttgaagtctcaatgcctaatgtgtgcacataaaacaggcacgaagaaacaaacgtgtgtatcctcttaattcctatatcacaaatatagcagaagcagcaatctgtacagtaaaatgcagtcatggaaaaaaaatctctctaaagcatctgaaatacttaaaaatgtttaactttaaaatgcatagtgatcaggaaaggaatacttaggcaagagaagcagctgaactcccacgttcacatgaagcatcccccatcgattcttaaagcatatgtaaagtaggacttaattgggtcacaaaccacaagaataatatacaactggctaaggggctatgtgataaataatcaggagagaatctattcatgcactagtttgatacagctaaattctttacagtacacaaaacccattaataatgtagtatagagaccaaaatgtaaagagagatagaatacattactgatgtgtggattaattcaagttcaggcatctacttgtgttacagcacagctgtcaaaaggcgataatgagtaaatcataaaacgggtttgtttcttcccacattattctataaatggacaccgatgggtagtgaagcaatggttttgctgtccaacttcagaggctgctgtggcgggggtctagttctgcatctgctcaaagaacttgtaggttggattttcgtagccgttctgctgcatcttggacaggtggcgctcctctggggtgacagcggcgtcaacctccaccacaccatgatgaatggatgtgtactgtttcttcttcagcatcaccaaggtgatgacgatcactgtcgctatgacaacaccgcccaccatgagtccaatgattgcacctttgtttgaacccacatcttctgcaaagaacaccaatttttgatgatgaacttcatatcctgagtcatgtcggaattctgcatccatcttcacttcagagatctcctccgtcttgatatttgtcaacccagaaccttcgttttctgtgttggctggcacagagtcagccccaaaagaatgccacggctggagatcgtccaggctgaactctccattcacgggaaggagctccacggtggttttcgtttcggtcaaagatggcatgagagcatcgtttccgtaactgatccttggttcactaatcatgttggccaagacgtcatctgaatagttttgctctttctgaagcagctcatcaacttcatcctgaatctcctcggccactgcaggcacgttgtagagcagggagagagactgattcatgcgctcataaatcacacggaggtgtgtcataacctgggaccggatctgagcggctttcttgggatccaccatgcgcacatgctcgaaatgctttagggtgtgctgtctgtccttctgttctgcgcggacatacttctttagcatattgaacacgtgacgaggccgaggaggaacagcctgcagagcggtgatgtagttctccagggccaggcggcggcggtcattgagcatggcttccactctggccatgtgtgtctccaccagctgctgtctctcgttggctgcttcctgttccaaagattccactttctcctggaaatgctggataactgccttcttatcagctttaggcaagttctttgcttgacgttctgcctcttcccattctctcatgacctgggacattctctctcggtgcttggcctcaagcctctctttggctttctggaaatgggcatgttcattctcatccccaggtgtctcgagatacttgtcaacggcatcaggggtactggctgctgttgtaggaatggcgctgccacacacggccatgcagtactcttctgtgtcaaagttgttccggttgccgccacatccgccgtaaaagaatggggcacacttcccttcagtcacatcaaagtaccagcgggagatcattgctcggcacggccccgtctcggcttgttcagagcacacctctcgaaccacctcttccacagactctgtggtggtggtggtggtggtggcaatgctggtggttctctctgtggcttcttcgtagggttcctcagcctcttcctctacctcatcaccatcctcatcgtcctcgtcatcatcggcttcttcttcttccacctcagccacttcttcctcctctgctacttctactactttgtcttcactcccatctgcatagtctgtgtctgctccgccccaccagacatccgagtcatcctcctccgcatcagcagaatccacattgtcactttcttcagccagtgggcaacacacaaactctacccctcggaacttgtcaattccgcagggcagcaacatgccgtagtcatgcaagttggtactcttctcactgcatgtctctttggcgacggtgtgccagtgaagatgagtttcgcaaacatccatcctctcctggtgtaagaatttgcacttgtcaggaacgagaagggcatcacttacaaactcaccaactaagcagcggtagggaatcacaaagtggggatgggtcttgcactgcttgcggccccgcttgcaccagttctggatggtcactggttggttggcttctaccacattggtgatctgcagttcagggtagacttcttggcaatactgcaggatgccttccttggtatcaatgcaggttttggtccctgatggatctgaatcccacttcccattctggacattcatgtgcatgttcagtctgccacagaacatggcaatctggggttcagccagcaggccagcattaccatcagtgggtacctccagcgcccgagccgtccaggcggccagcaggagcagtgccaaaccgggcagcatcgcgaccctgcgcggggcaccgagtgcgctgctgtgcgagtgggatccgccgcgtccttgctctgcccgcgccgccaccgccgccgtctcccggggcccccgcgcacgctcctccgcgtgctctcgcctaccgctgccgaggaaactgac

SEQ ID NO: 33 - protein, 733 aa, Homo sapiens
MLPGLALLLLAAWTARALEVPTDGNAGLLAEPQIAMFCGRLNMHMNVQNGKWDSDPSGTKTCIDTKEGILQYCQEVYPELQITNVVEANQPVTIQNWCKRGRKQCKTHPHFVIPYRCLVGEFVSDALLVPDKCKFLHQERMDVCETHLHWHTVAKETCSEKSTNLHDYGMLLPCGIDKFRGVEFVCCPLAEESDNVDSADAEEDDSDVWWGGADTDYADGSEDKVVEVAEEEEVAEVEEEEADDDEDDEDGDEVEEEAEEPYEEATERTTSIATTTTTTTESVEEVVREVCSEQAETGPCRAMISRWYFDVTEGKCAPFFYGGCGGNRNNFDTEEYCMAVCGSAIPTTAASTPDAVDKYLETPGDENEHAHFQKAKERLEAKHRERMSQVMREWEEAERQAKNLPKADKKAVIQHFQEKVESLEQEAANERQQLVETHMARVEAMLNDRRRLALENYITALQAVPPRPRHVFNMLKKYVRAEQKDRQHTLKHFEHVRMVDPKKAAQIRSQVMTHLRVIYERMNQSLSLLYNVPAVAEEIQDEVDELLQKEQNYSDDVLANMISEPRISYGNDALMPSLTETKTTVELLPVNGEFSLDDLQPWHSFGADSVPANTENEGSGLTNIKTEEISEVKMDAEFRHDSGYEVHHQKLVFFAEDVGSNKGAIIGLMVGGVVIATVIVITLVMLKKKQYTSIHHGVVEVDAAVTPEERHLSKMQQNGYENPTYKFFEQMQN

SEQ ID NO: 34 - DNA, 3304 bp, Homo sapiens
  source 1..3304: mol_type = other DNA
gtcagtttcctcggcagcggtaggcgagagcacgcggaggagcgtgcgcgggggccccgggagacggcggcggtggcggcgcgggcagagcaaggacgcggcggatcccactcgcacagcagcgcactcggtgccccgcgcagggtcgcgatgctgcccggtttggcactgctcctgctggccgcctggacggctcgggcgctggaggtacccactgatggtaatgctggcctgctggctgaaccccagattgccatgttctgtggcagactgaacatgcacatgaatgtccagaatgggaagtgggattcagatccatcagggaccaaaacctgcattgataccaaggaaggcatcctgcagtattgccaagaagtctaccctgaactgcagatcaccaatgtggtagaagccaaccaaccagtgaccatccagaactggtgcaagcggggccgcaagcagtgcaagacccatccccactttgtgattccctaccgctgcttagttggtgagtttgtaagtgatgcccttctcgttcctgacaagtgcaaattcttacaccaggagaggatggatgtttgcgaaactcatcttcactggcacaccgtcgccaaagagacatgcagtgagaagagtaccaacttgcatgactacggcatgttgctgccctgcggaattgacaagttccgaggggtagagtttgtgtgttgcccactggctgaagaaagtgacaatgtggattctgctgatgcggaggaggatgactcggatgtctggtggggcggagcagacacagactatgcagatgggagtgaagacaaagtagtagaagtagcagaggaggaagaagtggctgaggtggaagaagaagaagccgatgatgacgaggacgatgaggatggtgatgaggtagaggaagaggctgaggaaccctacgaagaagccacagagagaaccaccagcattgccaccaccaccaccaccaccacagagtctgtggaagaggtggttcgagttcctacaacagcagccagtacccctgatgccgttgacaagtatctcgagacacctggggatgagaatgaacatgcccatttccagaaagccaaagagaggcttgaggccaagcaccgagagagaatgtcccaggtcatgagagaatgggaagaggcagaacgtcaagcaaagaacttgcctaaagctgataagaaggcagttatccagcatttccaggagaaagtggaatctttggaacaggaagcagccaacgagagacagcagctggtggagacacacatggccagagtggaagccatgctcaatgaccgccgccgcctggccctggagaactacatcaccgctctgcaggctgttcctcctcggcctcgtcacgtgttcaatatgctaaagaagtatgtccgcgcagaacagaaggacagacagcacaccctaaagcatttcgagcatgtgcgcatggtggatcccaagaaagccgctcagatccggtcccaggttatgacacacctccgtgtgatttatgagcgcatgaatcagtctctctccctgctctacaacgtgcctgcagtggccgaggagattcaggatgaagttgatgagctgcttcagaaagagcaaaactattcagatgacgtcttggccaacatgattagtgaaccaaggatcagttacggaaacgatgctctcatgccatctttgaccgaaacgaaaaccaccgtggagctccttcccgtgaatggagagttcagcctggacgatctccagccgtggcattcttttggggctgactctgtgccagccaacacagaaaacgaaggttctgggttgacaaatatcaagacggaggagatctctgaagtgaagatggatgcagaattccgacatgactcaggatatgaagttcatcatcaaaaattggtgttctttgcagaagatgtgggttcaaacaaaggtgcaatcattggactcatggtgggcggtgttgtcatagcgacagtgatcgtcatcaccttggtgatgctgaagaagaaacagtacacatccattcatcatggtgtggtggaggttgacgccgctgtcaccccagaggagcgccacctgtccaagatgcagcagaacggctacgaaaatccaacctacaagttctttgagcagatgcagaactagacccccgccacagcagcctctgaagttggacagcaaaaccattgcttcactacccatcggtgtccatttatagaataatgtgggaagaaacaaacccgttttatgatttactcattatcgccttttgacagctgtgctgtaacacaagtagatgcctgaacttgaattaatccacacatcagtaatgtattctatctctctttacattttggtctctatactacattattaatgggttttgtgtactgtaaagaatttagctgtatcaaactagtgcatgaatagattctctcctgattatttatcacatagccccttagccagttgtatattattcttgtggtttgtgacccaattaagtcctactttacatatgctttaagaatcgatgggggatgcttcatgtgaacgtgggagttcagctgcttctcttgcctaagtattcctttcctgatcactatgcattttaaagttaaacatttttaagtatttcagatgctttagagagattttttttccatgactgcattttactgtacagattgctgcttctgctatatttgtgatataggaattaagaggatacacacgtttgtttcttcgtgcctgttttatgtgcacacattaggcattgagacttcaagcttttctttttttgtccacgtatctttgggtctttgataaagaaaagaatccctgttcattgtaagcacttttacggggcgggtggggaggggtgctctgctggtcttcaattaccaagaattctccaaaacaattttctgcaggatgattgtacagaatcattgcttatgacatgatcgctttctacactgtattacataaataaattaaataaaataaccccgggcaagacttttctttgaaggatgactacagacattaaataatcgaagtaattttgggtggggagaagaggcagattcaattttctttaaccagtctgaagtttcatttatgatacaaaagaagatgaaaatggaagtggcaatataaggggatgaggaaggcatgcctggacaaacccttcttttaagatgtgtcttcaatttgtataaaatggtgttttcatgtaaataaatacattcttggaggagca

SEQ ID NO: 35 - DNA, 3304 bp, synthetic construct
  misc_feature 1..3304: note = Synthetic
  source 1..3304: mol_type = other DNA
tgctcctccaagaatgtatttatttacatgaaaacaccattttatacaaattgaagacacatcttaaaagaagggtttgtccaggcatgccttcctcatccccttatattgccacttccattttcatcttcttttgtatcataaatgaaacttcagactggttaaagaaaattgaatctgcctcttctccccacccaaaattacttcgattatttaatgtctgtagtcatccttcaaagaaaagtcttgcccggggttattttatttaatttatttatgtaatacagtgtagaaagcgatcatgtcataagcaatgattctgtacaatcatcctgcagaaaattgttttggagaattcttggtaattgaagaccagcagagcacccctccccacccgccccgtaaaagtgcttacaatgaacagggattcttttctttatcaaagacccaaagatacgtggacaaaaaaagaaaagcttgaagtctcaatgcctaatgtgtgcacataaaacaggcacgaagaaacaaacgtgtgtatcctcttaattcctatatcacaaatatagcagaagcagcaatctgtacagtaaaatgcagtcatggaaaaaaaatctctctaaagcatctgaaatacttaaaaatgtttaactttaaaatgcatagtgatcaggaaaggaatacttaggcaagagaagcagctgaactcccacgttcacatgaagcatcccccatcgattcttaaagcatatgtaaagtaggacttaattgggtcacaaaccacaagaataatatacaactggctaaggggctatgtgataaataatcaggagagaatctattcatgcactagtttgatacagctaaattctttacagtacacaaaacccattaataatgtagtatagagaccaaaatgtaaagagagatagaatacattactgatgtgtggattaattcaagttcaggcatctacttgtgttacagcacagctgtcaaaaggcgataatgagtaaatcataaaacgggtttgtttcttcccacattattctataaatggacaccgatgggtagtgaagcaatggttttgctgtccaacttcagaggctgctgtggcgggggtctagttctgcatctgctcaaagaacttgtaggttggattttcgtagccgttctgctgcatcttggacaggtggcgctcctctggggtgacagcggcgtcaacctccaccacaccatgatgaatggatgtgtactgtttcttcttcagcatcaccaaggtgatgacgatcactgtcgctatgacaacaccgcccaccatgagtccaatgattgcacctttgtttgaacccacatcttctgcaaagaacaccaatttttgatgatgaacttcatatcctgagtcatgtcggaattctgcatccatcttcacttcagagatctcctccgtcttgatatttgtcaacccagaaccttcgttttctgtgttggctggcacagagtcagccccaaaagaatgccacggctggagatcgtccaggctgaactctccattcacgggaaggagctccacggtggttttcgtttcggtcaaagatggcatgagagcatcgtttccgtaactgatccttggttcactaatcatgttggccaagacgtcatctgaatagttttgctctttctgaagcagctcatcaacttcatcctgaatctcctcggccactgcaggcacgttgtagagcagggagagagactgattcatgcgctcataaatcacacggaggtgtgtcataacctgggaccggatctgagcggctttcttgggatccaccatgcgcacatgctcgaaatgctttagggtgtgctgtctgtccttctgttctgcgcggacatacttctttagcatattgaacacgtgacgaggccgaggaggaacagcctgcagagcggtgatgtagttctccagggccaggcggcggcggtcattgagcatggcttccactctggccatgtgtgtctccaccagctgctgtctctcgttggctgcttcctgttccaaagattccactttctcctggaaatgctggataactgccttcttatcagctttaggcaagttctttgcttgacgttctgcctcttcccattctctcatgacctgggacattctctctcggtgcttggcctcaagcctctctttggctttctggaaatgggcatgttcattctcatccccaggtgtctcgagatacttgtcaacggcatcaggggtactggctgctgttgtaggaactcgaaccacctcttccacagactctgtggtggtggtggtggtggtggcaatgctggtggttctctctgtggcttcttcgtagggttcctcagcctcttcctctacctcatcaccatcctcatcgtcctcgtcatcatcggcttcttcttcttccacctcagccacttcttcctcctctgctacttctactactttgtcttcactcccatctgcatagtctgtgtctgctccgccccaccagacatccgagtcatcctcctccgcatcagcagaatccacattgtcactttcttcagccagtgggcaacacacaaactctacccctcggaacttgtcaattccgcagggcagcaacatgccgtagtcatgcaagttggtactcttctcactgcatgtctctttggcgacggtgtgccagtgaagatgagtttcgcaaacatccatcctctcctggtgtaagaatttgcacttgtcaggaacgagaagggcatcacttacaaactcaccaactaagcagcggtagggaatcacaaagtggggatgggtcttgcactgcttgcggccccgcttgcaccagttctggatggtcactggttggttggcttctaccacattggtgatctgcagttcagggtagacttcttggcaatactgcaggatgccttccttggtatcaatgcaggttttggtccctgatggatctgaatcccacttcccattctggacattcatgtgcatgttcagtctgccacagaacatggcaatctggggttcagccagcaggccagcattaccatcagtgggtacctccagcgcccgagccgtccaggcggccagcaggagcagtgccaaaccgggcagcatcgcgaccctgcgcggggcaccgagtgcgctgctgtgcgagtgggatccgccgcgtccttgctctgcccgcgccgccaccgccgccgtctcccggggcccccgcgcacgctcctccgcgtgctctcgcctaccgctgccgaggaaactgac

SEQ ID NO: 36 - protein, 677 aa, Homo sapiens
MLPGLALLLLAAWTARALEVPTDGNAGLLAEPQIAMFCGRLNMHMNVQNGKWDSDPSGTKTCIDTKEGILQYCQEVYPELQITNVVEANQPVTIQNWCKRGRKQCKTHPHFVIPYRCLVGEFVSDALLVPDKCKFLHQERMDVCETHLHWHTVAKETCSEKSTNLHDYGMLLPCGIDKFRGVEFVCCPLAEESDNVDSADAEEDDSDVWWGGADTDYADGSEDKVVEVAEEEEVAEVEEEEADDDEDDEDGDEVEEEAEEPYEEATERTTSIATTTTTTTESVEEVVRVPTTAASTPDAVDKYLETPGDENEHAHFQKAKERLEAKHRERMSQVMREWEEAERQAKNLPKADKKAVIQHFQEKVESLEQEAANERQQLVETHMARVEAMLNDRRRLALENYITALQAVPPRPRHVFNMLKKYVRAEQKDRQHTLKHFEHVRMVDPKKAAQIRSQVMTHLRVIYERMNQSLSLLYNVPAVAEEIQDEVDELLQKEQNYSDDVLANMISEPRISYGNDALMPSLTETKTTVELLPVNGEFSLDDLQPWHSFGADSVPANTENEGSGLTNIKTEEISEVKMDAEFRHDSGYEVHHQKLVFFAEDVGSNKGAIIGLMVGGVVIATVIVITLVMLKKKQYTSIHHGVVEVDAAVTPEERHLSKMQQNGYENPTYKFFEQMQN

SEQ ID NO: 37 - DNA, 1795 bp, Homo sapiens
  source 1..1795: mol_type = other DNA
gtcagtttcctcggcagcggtaggcgagagcacgcggaggagcgtgcgcgggggccccgggagacggcggcggtggcggcgcgggcagagcaaggacgcggcggatcccactcgcacagcagcgcactcggtgccccgcgcagggtcgcgatgctgcccggtttggcactgctcctgctggccgcctggacggctcgggcgctggaggtacccactgatggtaatgctggcctgctggctgaaccccagattgccatgttctgtggcagactgaacatgcacatgaatgtccagaatgggaagtgggattcagatccatcagggaccaaaacctgcattgataccaaggaaggcatcctgcagtattgccaagaagtctaccctgaactgcagatcaccaatgtggtagaagccaaccaaccagtgaccatccagaactggtgcaagcggggccgcaagcagtgcaagacccatccccactttgtgattccctaccgctgcttagttggtgagtttgtaagtgatgcccttctcgttcctgacaagtgcaaattcttacaccaggagaggatggatgtttgcgaaactcatcttcactggcacaccgtcgccaaagagacatgcagtgagaagagtaccaacttgcatgactacggcatgttgctgccctgcggaattgacaagttccgaggggtagagtttgtgtgttgcccactggctgaagaaagtgacaatgtggattctgctgatgcggaggaggatgactcggatgtctggtggggcggagcagacacagactatgcagatgggagtgaagacaaagtagtagaagtagcagaggaggaagaagtggctgaggtggaagaagaagaagccgatgatgacgaggacgatgaggatggtgatgaggtagaggaagaggctgaggaaccctacgaagaagccacagagagaaccaccagcattgccaccaccaccaccaccaccacagagtctgtggaagaggtggttcgagaggtgtgctctgaacaagccgagacggggccgtgccgagcaatgatctcccgctggtactttgatgtgactgaagggaagtgtgccccattcttttacggcggatgtggcggcaaccggaacaactttgacacagaagagtactgcatggccgtgtgtggcagcgccattcctacaacagcagccagtacccctgatgccgttgacaagtatctcgagacacctggggatgagaatgaacatgcccatttccagaaagccaaagagaggcttgaggccaagcaccgagagagaatgtcccaggtcatgagagaatgggaagaggcagaacgtcaagcaaagaacttgcctaaagctgataagaaggcagttatccagcatttccaggagaaagtggaatctttggaacaggaagcagccaacgagagacagcagctggtggagacacacatggccagagtggaagccatgctcaatgaccgccgccgcctggccctggagaactacatcaccgctctgcaggctgttcctcctcggcctcgtcacgtgttcaatatgctaaagaagtatgtccgcgcagaacagaaggacagacagcacaccctaaagcatttcgagcatgtgcgcatggtggatcccaagaaagccgctcagatccggtcccaggttatgacacacctccgtgtgatttatgagcgcatgaatcagtctctctccctgctctacaacgtgcctgcagtggccgaggagattcaggatgaagttggtaagtaagctgttc

SEQ ID NO: 38 - DNA, 1795 bp, synthetic construct
  misc_feature 1..1795: note = Synthetic
  source 1..1795: mol_type = other DNA
gaacagcttacttaccaacttcatcctgaatctcctcggccactgcaggcacgttgtagagcagggagagagactgattcatgcgctcataaatcacacggaggtgtgtcataacctgggaccggatctgagcggctttcttgggatccaccatgcgcacatgctcgaaatgctttagggtgtgctgtctgtccttctgttctgcgcggacatacttctttagcatattgaacacgtgacgaggccgaggaggaacagcctgcagagcggtgatgtagttctccagggccaggcggcggcggtcattgagcatggcttccactctggccatgtgtgtctccaccagctgctgtctctcgttggctgcttcctgttccaaagattccactttctcctggaaatgctggataactgccttcttatcagctttaggcaagttctttgcttgacgttctgcctcttcccattctctcatgacctgggacattctctctcggtgcttggcctcaagcctctctttggctttctggaaatgggcatgttcattctcatccccaggtgtctcgagatacttgtcaacggcatcaggggtactggctgctgttgtaggaatggcgctgccacacacggccatgcagtactcttctgtgtcaaagttgttccggttgccgccacatccgccgtaaaagaatggggcacacttcccttcagtcacatcaaagtaccagcgggagatcattgctcggcacggccccgtctcggcttgttcagagcacacctctcgaaccacctcttccacagactctgtggtggtggtggtggtggtggcaatgctggtggttctctctgtggcttcttcgtagggttcctcagcctcttcctctacctcatcaccatcctcatcgtcctcgtcatcatcggcttcttcttcttccacctcagccacttcttcctcctctgctacttctactactttgtcttcactcccatctgcatagtctgtgtctgctccgccccaccagacatccgagtcatcctcctccgcatcagcagaatccacattgtcactttcttcagccagtgggcaacacacaaactctacccctcggaacttgtcaattccgcagggcagcaacatgccgtagtcatgcaagttggtactcttctcactgcatgtctctttggcgacggtgtgccagtgaagatgagtttcgcaaacatccatcctctcctggtgtaagaatttgcacttgtcaggaacgagaagggcatcacttacaaactcaccaactaagcagcggtagggaatcacaaagtggggatgggtcttgcactgcttgcggccccgcttgcaccagttctggatggtcactggttggttggcttctaccacattggtgatctgcagttcagggtagacttcttggcaatactgcaggatgccttccttggtatcaatgcaggttttggtccctgatggatctgaatcccacttcccattctggacattcatgtgcatgttcagtctgccacagaacatggcaatctggggttcagccagcaggccagcattaccatcagtgggtacctccagcgcccgagccgtccaggcggccagcaggagcagtgccaaaccgggcagcatcgcgaccctgcgcggggcaccgagtgcgctgctgtgcgagtgggatccgccgcgtccttgctctgcccgcgccgccaccgccgccgtctcccggggcccccgcgcacgctcctccgcgtgctctcgcctaccgctgccgaggaaactgac

SEQ ID NO: 39 - protein, 545 aa, Homo sapiens
MLPGLALLLLAAWTARALEVPTDGNAGLLAEPQIAMFCGRLNMHMNVQNGKWDSDPSGTKTCIDTKEGILQYCQEVYPELQITNVVEANQPVTIQNWCKRGRKQCKTHPHFVIPYRCLVGEFVSDALLVPDKCKFLHQERMDVCETHLHWHTVAKETCSEKSTNLHDYGMLLPCGIDKFRGVEFVCCPLAEESDNVDSADAEEDDSDVWWGGADTDYADGSEDKVVEVAEEEEVAEVEEEEADDDEDDEDGDEVEEEAEEPYEEATERTTSIATTTTTTTESVEEVVREVCSEQAETGPCRAMISRWYFDVTEGKCAPFFYGGCGGNRNNFDTEEYCMAVCGSAIPTTAASTPDAVDKYLETPGDENEHAHFQKAKERLEAKHRERMSQVMREWEEAERQAKNLPKADKKAVIQHFQEKVESLEQEAANERQQLVETHMARVEAMLNDRRRLALENYITALQAVPPRPRHVFNMLKKYVRAEQKDRQHTLKHFEHVRMVDPKKAAQIRSQVMTHLRVIYERMNQSLSLLYNVPAVAEEIQDEVGK

SEQ ID NO: 40 - DNA, 3926 bp, Macaca fascicularis
  source 1..3926: mol_type = other DNA
agctcacggggacgagcgggagcgctcccgacttttctagagccccagcgtcctaggactcacctttccctgatcctgcaccgtccctctcctggccccagactctccctcccactgttcccgaagcccaggtgggctgtctgccggggagctgaggagggcgcgtgtggtgcaggcggcgcctagggcgctgcacctgtgggcccggggcgcgcgggcccctcccggcgcgagcgggcgcagctccccggcggcgccgctaggggtctctctcgagtgccgagcggggtgggccggatcagctgacttgcctggctccgagcctcgccgccgcgctcctgctccgtcagtttcctcggcagcggtaggcgagagcactcggagcagcgcgcgcgggggcccccggagacggcggcggtggcgcgggcagagcaaggacgcggcggatcccactcgcacagcagcgcactcggtgccccgcgcagggtcgcgatgctgcccggtttggcactgctcctgctggccgcctggacggctcgggcgctggaggtacctactgatggcaatgctggcctgctggctgaaccccagatcgccatgttctgtggcagactgaacatgcacatgaatgtccagaatgggaagtgggattcagatccatcagggaccaaaacctgcattgataccaaggaaggcatcctgcagtattgccaagaagtctaccctgaactgcagatcaccaatgtggtagaagccaaccaaccagtgaccatccagaactggtgcaagcggggccgcaagcagtgcaagacccatccccactttgtgattccctaccgctgtttagttggtgagtttgtaagcgatgcccttctcgttcctgacaagtgcaaattcttacaccaggagaggatggatgtttgcgaaactcatcttcactggcacaccgtcgccaaagagacgtgcagtgagaagagcaccaacttgcatgactacggcatgttgctgccctgcggaatcgataagttccgaggggtagagtttgtgtgttgcccactggctgaggaaagtgacaatgtggattctgctgatgcggaggaggatgactcggatgtctggtggggcggagcagacacagactatgcagacgggagtgaagacaaagtagtagaagtagcagaggaggaagaagtggccgaggtggaagaagaagaagccgatgatgacgaggacgatgaggatggtgatgaggtagaggaagaggctgaggaaccctacgaagaagccacagagagaaccaccagcatcgccaccaccaccaccaccaccacggagtctgtggaagaggtggttcgagaggtgtgctctgaacaagccgagacggggccatgccgagcaatgatctcccgctggtactttgatgtgactgaagggaagtgtgccccattcttttacggcggatgtggcggcaaccggaacaactttgacacagaagagtactgcatggccgtgtgtggcagcgtcatgtcccaaagtttacgcaagactacccgggaacctcttacccgagatcctgttaaacttcctacaacagcagccagtacccctgatgccgttgacaagtaccttgagacacctggggatgagaatgaacacgcccatttccagaaagccaaagagagacttgaggccaagcaccgagagagaatgtcccaggtcatgagagaatgggaagaggcagaacgtcaggcaaagaacttgcctaaagctgataagaaggcagttatccagcatttccaggagaaagtggaatctttggaacaggaagcagccaacgagagacagcagctggtggagacacacatggccagagtggaagccatgctcaatgaccgccgccgcctggccctggagaactacatcactgctctgcaggccgttcctcctcggcctcgtcacgtgttcaatatgctgaagaagtacgtccgcgcagaacagaaggacagacagcacaccctgaagcatttcgagcatgtacgcatggtggatcccaagaaagctgctcagatccggtcccaggttatgacacacctccgtgtgatttacgagcgcatgaatcagtccctctccctgctctacaacgtgcctgcagtggccgaggagattcaggatgaagttgatgagctgcttcagaaagagcaaaactattcagatgacgtcttggccaacatgattagtgaaccaaggatcagttacggaaacgatgctctcatgccgtctttgaccgaaacgaaaactaccgtggagcttcttcccgtgaatggagagttcagcctggacgatcttcagccgtggcattctttcggggctgactctgtgccagccaacacagaaaacgaagttgagcctgttgatgcccgccctgctgccgaccgaggactgaccactcgaccaggttctgggttgacaaatatcaagacagaggagatctctgaagtgaagatggatgcagaattccgacatgactcaggttatgaagttcatcatcaaaaattggtgttctttgccgaagatgtgggttcaaacaaaggtgcaatcattggtctcatggtgggcggtgttgtcatagcaacagtgatcgtcatcaccttggtgatgctgaagaagaaacagtacacgtccattcatcatggtgtggtggaggttgacgccgctgtcaccccagaggagcgccacctgtccaagatgcagcagaacggctatgaaaatccaacctacaagttctttgagcagatgcagaactagacccccgccacagcagcctctgaagttggacagcaaaaccattgcttcactacccatcggtgtccatttatagaatactgtcggaagaaacaaacccctctgttttatgatttactcattatcgccttttgacagctgtgctgtaacacaagtagatgcctgaacttgaattaatccacaaatcagtaatgtattctctctctctttacattttggtctctacactacattattaatgggttttgtgtactgtaaagaatttagctgtatcaaactagtgcatgaatagattctctcctgattatttatcacatagccccttagccagttgtatattattcttgtggtttgtgacccaattaagtcctactttacatatgctttaagaatcgatgggggatgcttcatgtgaacgtgggagtttagctgcttctcttgcctaagtattcctttcctgatcactatgcattttaaagttaaacatttttaagtacttcagatgctttagagagattttttttccacgattgcattttactgtacagattgctgcttctgctatatttgtgatataggaattaagaggatacacgtttgtttctttgtgcctgttttatgtgcacacattaggcattgagacttcgagcttttttttttgtccacgtatctttgggtctttgataaagaaaagaatccctgttcattgtaagcacttttacggggcgggtggggaggggtgctctgctggtcttaaattaccaagaattctccaaaaaatatttctgcaggatgattgtacagaatcattgcttatgacatgatcgctttctacactgtattacataaataaattaaataaaataaccctgggcaagacttttctttgaaggatgactccagacattaaacagtcaaagtaattctgggcggggagagaagaggcagattcaattttctttaaccagtctgaagttttatttatgatacaacagaagatgaaaatggaagtggcaatataagggaaggaggaaggcatgcctggacaaacccttctttaagatgtgtcttcaatttgtataaaatggtgttttcatgtaaataaatacattcttggaggagca

SEQ ID NO: 41 - DNA, 3926 bp, synthetic construct
  misc_feature 1..3926: note = Synthetic
  source 1..3926: mol_type = other DNA
tgctcctccaagaatgtatttatttacatgaaaacaccattttatacaaattgaagacacatcttaaagaagggtttgtccaggcatgccttcctccttcccttatattgccacttccattttcatcttctgttgtatcataaataaaacttcagactggttaaagaaaattgaatctgcctcttctctccccgcccagaattactttgactgtttaatgtctggagtcatccttcaaagaaaagtcttgcccagggttattttatttaatttatttatgtaatacagtgtagaaagcgatcatgtcataagcaatgattctgtacaatcatcctgcagaaatattttttggagaattcttggtaatttaagaccagcagagcacccctccccacccgccccgtaaaagtgcttacaatgaacagggattcttttctttatcaaagacccaaagatacgtggacaaaaaaaaaagctcgaagtctcaatgcctaatgtgtgcacataaaacaggcacaaagaaacaaacgtgtatcctcttaattcctatatcacaaatatagcagaagcagcaatctgtacagtaaaatgcaatcgtggaaaaaaaatctctctaaagcatctgaagtacttaaaaatgtttaactttaaaatgcatagtgatcaggaaaggaatacttaggcaagagaagcagctaaactcccacgttcacatgaagcatcccccatcgattcttaaagcatatgtaaagtaggacttaattgggtcacaaaccacaagaataatatacaactggctaaggggctatgtgataaataatcaggagagaatctattcatgcactagtttgatacagctaaattctttacagtacacaaaacccattaataatgtagtgtagagaccaaaatgtaaagagagagagaatacattactgatttgtggattaattcaagttcaggcatctacttgtgttacagcacagctgtcaaaaggcgataatgagtaaatcataaaacagaggggtttgtttcttccgacagtattctataaatggacaccgatgggtagtgaagcaatggttttgctgtccaacttcagaggctgctgtggcgggggtctagttctgcatctgctcaaagaacttgtaggttggattttcatagccgttctgctgcatcttggacaggtggcgctcctctggggtgacagcggcgtcaacctccaccacaccatgatgaatggacgtgtactgtttcttcttcagcatcaccaaggtgatgacgatcactgttgctatgacaacaccgcccaccatgagaccaatgattgcacctttgtttgaacccacatcttcggcaaagaacaccaatttttgatgatgaacttcataacctgagtcatgtcggaattctgcatccatcttcacttcagagatctcctctgtcttgatatttgtcaacccagaacctggtcgagtggtcagtcctcggtcggcagcagggcgggcatcaacaggctcaacttcgttttctgtgttggctggcacagagtcagccccgaaagaatgccacggctgaagatcgtccaggctgaactctccattcacgggaagaagctccacggtagttttcgtttcggtcaaagacggcatgagagcatcgtttccgtaactgatccttggttcactaatcatgttggccaagacgtcatctgaatagttttgctctttctgaagcagctcatcaacttcatcctgaatctcctcggccactgcaggcacgttgtagagcagggagagggactgattcatgcgctcgtaaatcacacggaggtgtgtcataacctgggaccggatctgagcagctttcttgggatccaccatgcgtacatgctcgaaatgcttcagggtgtgctgtctgtccttctgttctgcgcggacgtacttcttcagcatattgaacacgtgacgaggccgaggaggaacggcctgcagagcagtgatgtagttctccagggccaggcggcggcggtcattgagcatggcttccactctggccatgtgtgtctccaccagctgctgtctctcgttggctgcttcctgttccaaagattccactttctcctggaaatgctggataactgccttcttatcagctttaggcaagttctttgcctgacgttctgcctcttcccattctctcatgacctgggacattctctctcggtgcttggcctcaagtctctctttggctttctggaaatgggcgtgttcattctcatccccaggtgtctcaaggtacttgtcaacggcatcaggggtactggctgctgttgtaggaagtttaacaggatctcgggtaagaggttcccgggtagtcttgcgtaaactttgggacatgacgctgccacacacggccatgcagtactcttctgtgtcaaagttgttccggttgccgccacatccgccgtaaaagaatggggcacacttcccttcagtcacatcaaagtaccagcgggagatcattgctcggcatggccccgtctcggcttgttcagagcacacctctcgaaccacctcttccacagactccgtggtggtggtggtggtggtggcgatgctggtggttctctctgtggcttcttcgtagggttcctcagcctcttcctctacctcatcaccatcctcatcgtcctcgtcatcatcggcttcttcttcttccacctcggccacttcttcctcctctgctacttctactactttgtcttcactcccgtctgcatagtctgtgtctgctccgccccaccagacatccgagtcatcctcctccgcatcagcagaatccacattgtcactttcctcagccagtgggcaacacacaaactctacccctcggaacttatcgattccgcagggcagcaacatgccgtagtcatgcaagttggtgctcttctcactgcacgtctctttggcgacggtgtgccagtgaagatgagtttcgcaaacatccatcctctcctggtgtaagaatttgcacttgtcaggaacgagaagggcatcgcttacaaactcaccaactaaacagcggtagggaatcacaaagtggggatgggtcttgcactgcttgcggccccgcttgcaccagttctggatggtcactggttggttggcttctaccacattggtgatctgcagttcagggtagacttcttggcaatactgcaggatgccttccttggtatcaatgcaggttttggtccctgatggatctgaatcccacttcccattctggacattcatgtgcatgttcagtctgccacagaacatggcgatctggggttcagccagcaggccagcattgccatcagtaggtacctccagcgcccgagccgtccaggcggccagcaggagcagtgccaaaccgggcagcatcgcgaccctgcgcggggcaccgagtgcgctgctgtgcgagtgggatccgccgcgtccttgctctgcccgcgccaccgccgccgtctccgggggcccccgcgcgcgctgctccgagtgctctcgcctaccgctgccgaggaaactgacggagcaggagcgcggcggcgaggctcggagccaggcaagtcagctgatccggcccaccccgctcggcactcgagagagacccctagcggcgccgccggggagctgcgcccgctcgcgccgggaggggcccgcgcgccccgggcccacaggtgcagcgccctaggcgccgcctgcaccacacgcgccctcctcagctccccggcagacagcccacctgggcttcgggaacagtgggagggagagtctggggccaggagagggacggtgcaggatcagggaaaggtgagtcctaggacgctggggctctagaaaagtcgggagcgctcccgctcgtccccgtgagct

SEQ ID NO: 42 - protein, 770 aa, Macaca fascicularis
MLPGLALLLLAAWTARALEVPTDGNAGLLAEPQIAMFCGRLNMHMNVQNGKWDSDPSGTKTCIDTKEGILQYCQEVYPELQITNVVEANQPVTIQNWCKRGRKQCKTHPHFVIPYRCLVGEFVSDALLVPDKCKFLHQERMDVCETHLHWHTVAKETCSEKSTNLHDYGMLLPCGIDKFRGVEFVCCPLAEESDNVDSADAEEDDSDVWWGGADTDYADGSEDKVVEVAEEEEVAEVEEEEADDDEDDEDGDEVEEEAEEPYEEATERTTSIATTTTTTTESVEEVVREVCSEQAETGPCRAMISRWYFDVTEGKCAPFFYGGCGGNRNNFDTEEYCMAVCGSVMSQSLRKTTREPLTRDPVKLPTTAASTPDAVDKYLETPGDENEHAHFQKAKERLEAKHRERMSQVMREWEEAERQAKNLPKADKKAVIQHFQEKVESLEQEAANERQQLVETHMARVEAMLNDRRRLALENYITALQAVPPRPRHVFNMLKKYVRAEQKDRQHTLKHFEHVRMVDPKKAAQIRSQVMTHLRVIYERMNQSLSLLYNVPAVAEEIQDEVDELLQKEQNYSDDVLANMISEPRISYGNDALMPSLTETKTTVELLPVNGEFSLDDLQPWHSFGADSVPANTENEVEPVDARPAADRGLTTRPGSGLTNIKTEEISEVKMDAEFRHDSGYEVHHQKLVFFAEDVGSNKGAIIGLMVGGVVIATVIVITLVMLKKKQYTSIHHGVVEVDAAVTPEERHLSKMQQNGYENPTYKFFEQMQN

SEQ ID NO: 43 - DNA, 3377 bp, Mus musculus
  source 1..3377: mol_type = other DNA
gtcagtttcctcggcggcgggaggcgagagcaccgggagcagagcgagcgcggggccaccggagacggcggcggcggcgcggacacagccagggcgcggcggatcttccactcgcacacggagcactcggtggcccacgcaggatcacgatgctgcccagcttggcactgctcctgctggccgcctggacggttcgggctctggaggtacccactgatggcaacgccgggctgctggcagaaccccagatcgccatgttctgtggtaaactcaacatgcacatgaatgtgcagaatggaaagtgggagtcagacccgtcagggaccaaaacctgcattggcaccaaggagggcatcttgcagtactgccaagaggtctaccctgaactgcagatcacaaacgtggtggaagccaaccagccagtgaccatccagaactggtgcaagcggggccgcaagcagtgcaagacacacacccacatcgtgattccttaccgttgcctagttggtgagtttgtgagcgacgcccttctcgtgcccgacaagtgcaagttcctacaccaggagcggatggatgtttgtgagacccatcttcactggcacaccgtcgccaaagagacatgcagcgagaagagcactaacttgcacgactatggcatgctgctgccctgcggcatcgacaagttccgaggggtagagtttgtatgctgcccgttggccgaggaaagcgacagcgtggattctgcggatgcagaggaggatgactctgatgtctggtggggtggagcggacacagactacgctgatggcggtgaagacaaagtagtagaagtcgccgaagaggaggaagtggctgatgttgaggaagaggaagctgatgatgatgaggatgtggaggatggggacgaggtggaggaggaggccgaggagccctacgaagaggccaccgagagaacaaccagcactgccaccaccaccacaaccaccactgagtccgtggaggaggtggtccgagaggtgtgctctgaacaagccgagaccgggccatgccgcgcaatgatctcccgctggtactttgatgtcactgaagggaagtgtgtcccattcttttacggcggatgtggcggcaacaggaacaactttgacacggaagagtactgcatggcggtgtgtggcagcgtgtcaacccaaagtttactcaagactaccagtgaacctcttccccaagatcctgataaacttcccacgacagcagccagcacccccgacgccgtcgacaagtacctggagacacccggggacgagaacgagcatgcccatttccagaaagccaaagagaggctggaagccaagcaccgagagagaatgtcccaggtcatgagagaatgggaagaggcagagcgtcaagccaagaacttgcccaaagctgacaagaaggccgttatccagcatttccaggagaaagtggaatctctggaacaggaagcagccaatgagagacagcagcttgtagagacacacatggccagagttgaagccatgctcaatgaccgccgccgcctggccctcgagaattacatcactgcactgcaggcggtgcccccaaggcctcatcatgtgttcaacatgctgaagaagtacgtccgtgcggagcagaaagacagacagcacaccctaaagcattttgaacatgtgcgcatggtggaccccaagaaagctgctcagatccggtcccaggttatgacacacctccgtgtgatctacgagcgcatgaaccagtctctgtccctgctctacaatgtccctgcggtggctgaggagattcaagatgaagtcgatgagctgcttcagaaggagcagaactactccgacgatgtcttggccaacatgatcagtgagcccagaatcagctacggaaacgacgctctcatgccttcgctgacggaaaccaagaccaccgtggagctccttcccgtgaatggggaattcagcctggatgacctccagccgtggcacccttttggggtggactctgtgccagccaataccgaaaatgaagtcgagcctgttgacgcccgccccgctgctgaccgaggactgaccactcgaccaggttctgggctgacaaacatcaagacggaagagatctcggaagtgaagatggatgcagaattcggacatgattcaggatttgaagtccgccatcaaaaactggtgttctttgctgaagatgtgggttcgaacaaaggcgccatcatcggactcatggtgggcggcgttgtcatagcaaccgtgattgtcatcaccctggtgatgttgaagaagaaacagtacacatccatccatcatggcgtggtggaggtcgacgccgccgtgaccccagaggagcgccatctctccaagatgcagcagaacggatatgagaatccaacttacaagttctttgagcaaatgcagaactaagccccacccgcgccacagcagcggcctctgaacttggacagcgaaaccattgcttcactacccatcggtgttcatttataaaataacgtggaaagaaacaaacccttccgtttatttactcaccctcggcttttgacagctgtgctgtaacacaagtagatgcctgaacttgaattaatatacaaatcagtaatgtattctcgctttctctctttacattctggtctctacattacatgattcatgggttttgtgtactgtaaaaaaaaaaattagctgtatcaaactagtgcatgaatagattctctcctaattatttatcacatacatagccccttagcccgttgtatattattcttgtggtttgtggcccggaaaaaactcctacttgaaatatgctttaaaaatcgatgggggatgcttcttgtgaacgtgggcgtctagctgcttctcctacgtattcttttcctgatcactatgcattttgaacatttttttaagtattccaaatgacttagaaaattctttttccatgactgcatcttactgtacagattgctgcttctgctctctttgtgatataggaataagaggatacacattgatttctttgtgcctgttttatgtgcacacattaggcattgagaatttgaacattttttttgtccatgtatctttggatctttgataaaaaaaaattaaaaaaaaattatccctgttcatcataagcacttttacgggtggggggagggagtgttctgctggtctccaattaccaagaattctccaaaaattaattttctgcaggatgattgtacagaatcattgcttatgccatgatagctttctacactgtattacataaataaattaaataaaataactccaggcaagaaaaaaaaaaaaaaaaaaaaa

SEQ ID NO: 44 - DNA, 3377 bp, synthetic construct
  misc_feature 1..3377: note = Synthetic
  source 1..3377: mol_type = other DNA
tttttttttttttttttttttcttgcctggagttattttatttaatttatttatgtaatacagtgtagaaagctatcatggcataagcaatgattctgtacaatcatcctgcagaaaattaatttttggagaattcttggtaattggagaccagcagaacactccctccccccacccgtaaaagtgcttatgatgaacagggataatttttttttaatttttttttatcaaagatccaaagatacatggacaaaaaaaatgttcaaattctcaatgcctaatgtgtgcacataaaacaggcacaaagaaatcaatgtgtatcctcttattcctatatcacaaagagagcagaagcagcaatctgtacagtaagatgcagtcatggaaaaagaattttctaagtcatttggaatacttaaaaaaatgttcaaaatgcatagtgatcaggaaaagaatacgtaggagaagcagctagacgcccacgttcacaagaagcatcccccatcgatttttaaagcatatttcaagtaggagttttttccgggccacaaaccacaagaataatatacaacgggctaaggggctatgtatgtgataaataattaggagagaatctattcatgcactagtttgatacagctaatttttttttttacagtacacaaaacccatgaatcatgtaatgtagagaccagaatgtaaagagagaaagcgagaatacattactgatttgtatattaattcaagttcaggcatctacttgtgttacagcacagctgtcaaaagccgagggtgagtaaataaacggaagggtttgtttctttccacgttattttataaatgaacaccgatgggtagtgaagcaatggtttcgctgtccaagttcagaggccgctgctgtggcgcgggtggggcttagttctgcatttgctcaaagaacttgtaagttggattctcatatccgttctgctgcatcttggagagatggcgctcctctggggtcacggcggcgtcgacctccaccacgccatgatggatggatgtgtactgtttcttcttcaacatcaccagggtgatgacaatcacggttgctatgacaacgccgcccaccatgagtccgatgatggcgcctttgttcgaacccacatcttcagcaaagaacaccagtttttgatggcggacttcaaatcctgaatcatgtccgaattctgcatccatcttcacttccgagatctcttccgtcttgatgtttgtcagcccagaacctggtcgagtggtcagtcctcggtcagcagcggggcgggcgtcaacaggctcgacttcattttcggtattggctggcacagagtccaccccaaaagggtgccacggctggaggtcatccaggctgaattccccattcacgggaaggagctccacggtggtcttggtttccgtcagcgaaggcatgagagcgtcgtttccgtagctgattctgggctcactgatcatgttggccaagacatcgtcggagtagttctgctccttctgaagcagctcatcgacttcatcttgaatctcctcagccaccgcagggacattgtagagcagggacagagactggttcatgcgctcgtagatcacacggaggtgtgtcataacctgggaccggatctgagcagctttcttggggtccaccatgcgcacatgttcaaaatgctttagggtgtgctgtctgtctttctgctccgcacggacgtacttcttcagcatgttgaacacatgatgaggccttgggggcaccgcctgcagtgcagtgatgtaattctcgagggccaggcggcggcggtcattgagcatggcttcaactctggccatgtgtgtctctacaagctgctgtctctcattggctgcttcctgttccagagattccactttctcctggaaatgctggataacggccttcttgtcagctttgggcaagttcttggcttgacgctctgcctcttcccattctctcatgacctgggacattctctctcggtgcttggcttccagcctctctttggctttctggaaatgggcatgctcgttctcgtccccgggtgtctccaggtacttgtcgacggcgtcgggggtgctggctgctgtcgtgggaagtttatcaggatcttggggaagaggttcactggtagtcttgagtaaactttgggttgacacgctgccacacaccgccatgcagtactcttccgtgtcaaagttgttcctgttgccgccacatccgccgtaaaagaatgggacacacttcccttcagtgacatcaaagtaccagcgggagatcattgcgcggcatggcccggtctcggcttgttcagagcacacctctcggaccacctcctccacggactcagtggtggttgtggtggtggtggcagtgctggttgttctctcggtggcctcttcgtagggctcctcggcctcctcctccacctcgtccccatcctccacatcctcatcatcatcagcttcctcttcctcaacatcagccacttcctcctcttcggcgacttctactactttgtcttcaccgccatcagcgtagtctgtgtccgctccaccccaccagacatcagagtcatcctcctctgcatccgcagaatccacgctgtcgctttcctcggccaacgggcagcatacaaactctacccctcggaacttgtcgatgccgcagggcagcagcatgccatagtcgtgcaagttagtgctcttctcgctgcatgtctctttggcgacggtgtgccagtgaagatgggtctcacaaacatccatccgctcctggtgtaggaacttgcacttgtcgggcacgagaagggcgtcgctcacaaactcaccaactaggcaacggtaaggaatcacgatgtgggtgtgtgtcttgcactgcttgcggccccgcttgcaccagttctggatggtcactggctggttggcttccaccacgtttgtgatctgcagttcagggtagacctcttggcagtactgcaagatgccctccttggtgccaatgcaggttttggtccctgacgggtctgactcccactttccattctgcacattcatgtgcatgttgagtttaccacagaacatggcgatctggggttctgccagcagcccggcgttgccatcagtgggtacctccagagcccgaaccgtccaggcggccagcaggagcagtgccaagctgggcagcatcgtgatcctgcgtgggccaccgagtgctccgtgtgcgagtggaagatccgccgcgccctggctgtgtccgcgccgccgccgccgtctccggtggccccgcgctcgctctgctcccggtgctctcgcctcccgccgccgaggaaactgac

SEQ ID NO: 45 - protein, 770 aa, Mus musculus
MLPSLALLLLAAWTVRALEVPTDGNAGLLAEPQIAMFCGKLNMHMNVQNGKWESDPSGTKTCIGTKEGILQYCQEVYPELQITNVVEANQPVTIQNWCKRGRKQCKTHTHIVIPYRCLVGEFVSDALLVPDKCKFLHQERMDVCETHLHWHTVAKETCSEKSTNLHDYGMLLPCGIDKFRGVEFVCCPLAEESDSVDSADAEEDDSDVWWGGADTDYADGGEDKVVEVAEEEEVADVEEEEADDDEDVEDGDEVEEEAEEPYEEATERTTSTATTTTTTTESVEEVVREVCSEQAETGPCRAMISRWYFDVTEGKCVPFFYGGCGGNRNNFDTEEYCMAVCGSVSTQSLLKTTSEPLPQDPDKLPTTAASTPDAVDKYLETPGDENEHAHFQKAKERLEAKHRERMSQVMREWEEAERQAKNLPKADKKAVIQHFQEKVESLEQEAANERQQLVETHMARVEAMLNDRRRLALENYITALQAVPPRPHHVFNMLKKYVRAEQKDRQHTLKHFEHVRMVDPKKAAQIRSQVMTHLRVIYERMNQSLSLLYNVPAVAEEIQDEVDELLQKEQNYSDDVLANMISEPRISYGNDALMPSLTETKTTVELLPVNGEFSLDDLQPWHPFGVDSVPANTENEVEPVDARPAADRGLTTRPGSGLTNIKTEEISEVKMDAEFGHDSGFEVRHQKLVFFAEDVGSNKGAIIGLMVGGVVIATVIVITLVMLKKKQYTSIHHGVVEVDAAVTPEERHLSKMQQNGYENPTYKFFEQMQN

SEQ ID NO: 46 - DNA, 2340 bp, Rattus norvegicus
  source 1..2340: mol_type = other DNA
gtcggtggcccacgcaggatcacgatgctgcccagcctggcactgctcctgctggccgcctggacggttcgggctctggaggtgcccactgatggcaatgccggtctgctggcagaaccccagatcgccatgttctgtggtaaactcaacatgcacatgaatgtgcagaatggaaaatgggagtcagacccatcagggaccaaaacctgcattggcaccaaggagggaatcctgcagtactgccaagaggtctaccctgaactgcagatcacaaacgtggtggaagccaaccagccagtgaccatccagaactggtgcaagcggggccgcaagcagtgcaagacgcacacccacatcgtgattccttaccggtgcctagttggtgagtttgtaagcgatgcccttctcgtgcccgacaagtgcaagtttctacaccaggagcggatggacgtttgtgagacccatcttcactggcatactgttgccaaagagacatgcagtgagaagagcactaacttgcacgactatggcatgctgctgccctgtggcatcgacaagttccgaggggtcgagttcgtgtgctgcccgttggcggaggagagcgacagcatcgattctgcggacgcagaggaggacgactccgatgtctggtggggtggagcggacacagactatgctgatggcggtgaagacaaagtcgtagaagtagccgaagaggaggaagtggccgatgttgaggaagaagaagctgaggatgacgaggatgtggaggatggggatgaggtggaggaggaggccgaggagccctacgaagaggccacagagagaacaaccagcattgccaccactaccacaactaccactgagtctgtggaggaggtagtccgagaggtgtgctctgaacaagctgagaccgggccatgccgtgcaatgatctcccgctggtactttgatgtcactgaaggaaagtgcgccccattcttttacggcggatgtggcggcaacaggaacaactttgacactgaagagtactgcatggcggtgtgtggcagcgtgtcatcccaaagtttactcaagactaccagtgaacctcttccccaagatccggttaaacttcccacgacggcagccagcacccctgacgcagtcgacaagtacctggagacccccggagatgagaacgagcacgcccatttccagaaagccaaagagaggttggaagccaagcaccgagagagaatgtcccaggtcatgagagaatgggaggaggcagaacgtcaagccaagaatttgcccaaagctgacaagaaggccgttatccagcatttccaggagaaagtggaatctctggaacaggaagcagccaacgagaggcagcagcttgtagagacacacatggccagagttgaagccatgctcaatgatcgccgtcgcctggccctcgagaattacatcaccgcactgcaggcggtgcctccaaggcctcatcatgtgttcaacatgctgaagaagtacgtccgtgcagagcagaaggacagacagcacaccctaaagcattttgaacatgtgcgcatggtggaccccaagaaagctgctcagatccggtcccaggttatgacacacctccgtgtgatctacgagcgcatgaaccagtctctgtccctgctctacaacgtccctgccgtggctgaggagattcaagatgaagttgacgagctgcttcagaaggagcagaactactccgacgacgtcttagccaacatgatcagtgaacccagaatcagttacggcaacgatgctctcatgccttctttgactgaaacgaagaccactgtggagctccttcccgtgaatggcgaattcagcctggatgatctccaaccgtggcatccttttggggtggactctgtgccagccaatacagaaaatgaagttgagcctgtcgacgcccgccccgctgctgaccgaggactgaccactcgaccagggtctgggttgacaaacatcaagacagaagagatctcagaagtgaagatggatgcggagttcggacatgattcaggcttcgaagtccgccatcaaaaactggtgttctttgcagaagatgtgggttcaaacaaaggtgccatcattggactcatggtgggtggcgttgtcatagcaacagtgattgtcatcaccttggtgatgctgaagaagaaacagtacacatccatccatcatggcgtggtggaggttgacgctgctgtgaccccggaggagcgccacctctccaagatgcagcagaatggatatgagaatccaacatacaagttctttgagcagatgcagaactaaacc

SEQ ID NO: 47 - DNA, 2340 bp, synthetic construct
  misc_feature 1..2340: note = Synthetic
  source 1..2340: mol_type = other DNA
ggtttagttctgcatctgctcaaagaacttgtatgttggattctcatatccattctgctgcatcttggagaggtggcgctcctccggggtcacagcagcgtcaacctccaccacgccatgatggatggatgtgtactgtttcttcttcagcatcaccaaggtgatgacaatcactgttgctatgacaacgccacccaccatgagtccaatgatggcacctttgtttgaacccacatcttctgcaaagaacaccagtttttgatggcggacttcgaagcctgaatcatgtccgaactccgcatccatcttcacttctgagatctcttctgtcttgatgtttgtcaacccagaccctggtcgagtggtcagtcctcggtcagcagcggggcgggcgtcgacaggctcaacttcattttctgtattggctggcacagagtccaccccaaaaggatgccacggttggagatcatccaggctgaattcgccattcacgggaaggagctccacagtggtcttcgtttcagtcaaagaaggcatgagagcatcgttgccgtaactgattctgggttcactgatcatgttggctaagacgtcgtcggagtagttctgctccttctgaagcagctcgtcaacttcatcttgaatctcctcagccacggcagggacgttgtagagcagggacagagactggttcatgcgctcgtagatcacacggaggtgtgtcataacctgggaccggatctgagcagctttcttggggtccaccatgcgcacatgttcaaaatgctttagggtgtgctgtctgtccttctgctctgcacggacgtacttcttcagcatgttgaacacatgatgaggccttggaggcaccgcctgcagtgcggtgatgtaattctcgagggccaggcgacggcgatcattgagcatggcttcaactctggccatgtgtgtctctacaagctgctgcctctcgttggctgcttcctgttccagagattccactttctcctggaaatgctggataacggccttcttgtcagctttgggcaaattcttggcttgacgttctgcctcctcccattctctcatgacctgggacattctctctcggtgcttggcttccaacctctctttggctttctggaaatgggcgtgctcgttctcatctccgggggtctccaggtacttgtcgactgcgtcaggggtgctggctgccgtcgtgggaagtttaaccggatcttggggaagaggttcactggtagtcttgagtaaactttgggatgacacgctgccacacaccgccatgcagtactcttcagtgtcaaagttgttcctgttgccgccacatccgccgtaaaagaatggggcgcactttccttcagtgacatcaaagtaccagcgggagatcattgcacggcatggcccggtctcagcttgttcagagcacacctctcggactacctcctccacagactcagtggtagttgtggtagtggtggcaatgctggttgttctctctgtggcctcttcgtagggctcctcggcctcctcctccacctcatccccatcctccacatcctcgtcatcctcagcttcttcttcctcaacatcggccacttcctcctcttcggctacttctacgactttgtcttcaccgccatcagcatagtctgtgtccgctccaccccaccagacatcggagtcgtcctcctctgcgtccgcagaatcgatgctgtcgctctcctccgccaacgggcagcacacgaactcgacccctcggaacttgtcgatgccacagggcagcagcatgccatagtcgtgcaagttagtgctcttctcactgcatgtctctttggcaacagtatgccagtgaagatgggtctcacaaacgtccatccgctcctggtgtagaaacttgcacttgtcgggcacgagaagggcatcgcttacaaactcaccaactaggcaccggtaaggaatcacgatgtgggtgtgcgtcttgcactgcttgcggccccgcttgcaccagttctggatggtcactggctggttggcttccaccacgtttgtgatctgcagttcagggtagacctcttggcagtactgcaggattccctccttggtgccaatgcaggttttggtccctgatgggtctgactcccattttccattctgcacattcatgtgcatgttgagtttaccacagaacatggcgatctggggttctgccagcagaccggcattgccatcagtgggcacctccagagcccgaaccgtccaggcggccagcaggagcagtgccaggctgggcagcatcgtgatcctgcgtgggccaccgac

SEQ ID NO: 48 - protein, 770 aa, Rattus norvegicus
MLPSLALLLLAAWTVRALEVPTDGNAGLLAEPQIAMFCGKLNMHMNVQNGKWESDPSGTKTCIGTKEGILQYCQEVYPELQITNVVEANQPVTIQNWCKRGRKQCKTHTHIVIPYRCLVGEFVSDALLVPDKCKFLHQERMDVCETHLHWHTVAKETCSEKSTNLHDYGMLLPCGIDKFRGVEFVCCPLAEESDSIDSADAEEDDSDVWWGGADTDYADGGEDKVVEVAEEEEVADVEEEEAEDDEDVEDGDEVEEEAEEPYEEATERTTSIATTTTTTTESVEEVVREVCSEQAETGPCRAMISRWYFDVTEGKCAPFFYGGCGGNRNNFDTEEYCMAVCGSVSSQSLLKTTSEPLPQDPVKLPTTAASTPDAVDKYLETPGDENEHAHFQKAKERLEAKHRERMSQVMREWEEAERQAKNLPKADKKAVIQHFQEKVESLEQEAANERQQLVETHMARVEAMLNDRRRLALENYITALQAVPPRPHHVFNMLKKYVRAEQKDRQHTLKHFEHVRMVDPKKAAQIRSQVMTHLRVIYERMNQSLSLLYNVPAVAEEIQDEVDELLQKEQNYSDDVLANMISEPRISYGNDALMPSLTETKTTVELLPVNGEFSLDDLQPWHPFGVDSVPANTENEVEPVDARPAADRGLTTRPGSGLTNIKTEEISEVKMDAEFGHDSGFEVRHQKLVFFAEDVGSNKGAIIGLMVGGVVIATVIVITLVMLKKKQYTSIHHGVVEVDAAVTPEERHLSKMQQNGYENPTYKFFEQMQN

SEQ ID NO: 49 - DNA, 555 bp, Homo sapiens
  source 1..555: mol_type = other DNA
atgctgcccggtttggcactgctcctgctggccgcctggacggctcgggcgctggaggtacccactgatggtaatgctggcctgctggctgaaccccagattgccatgttctgtggcagactgaacatgcacatgaatgtccagaatgggaagtgggattcagatccatcagggaccaaaacctgcattgataccaaggaaggcatcctgcagtattgccaagaagtctaccctgaactgcagatcaccaagatggatgcagaattccgacatgactcaggatatgaagttcatcatcaaaaattggtgttctttgcagaagatgtgggttcaaacaaaggtgcaatcattggactcatggtgggcggtgttgtcatagcgacagtgatcgtcatcaccttggtgatgctgaagaagaaacagtacacatccattcatcatggtgtggtggaggttgacgccgctgtcaccccagaggagcgccacctgtccaagatgcagcagaacggctacgaaaatccaacctacaagttctttgagcagatgcagaactag

SEQ ID NO: 50 - DNA, 555 bp, Homo sapiens
  source 1..555: mol_type = other DNA
atgctgcccggtttggcactgctcctgctggccgcctggacggctcgggcgctggaggtacccactgatggtaatgctggcctgctggctgaaccccagattgccatgttctgtggcagactgaacatgcacatgaatgtccagaatgggaagtgggattcagatccatcagggaccaaaacctgcattgataccaaggaaggcatcctgcagtattgccaagaagtctaccctgaactgcagatcaccaagatggatgcagaattccgacatgactcaggatatgaagttcatcatcaaaaattggtgttctttgcagaagatgtgggttcaaacaaaggtgcaatcattggactcatagtgggcggtgttgtcatagcgacagtgatcgtcatcaccttggtgatgctgaagaagaaacagtacacatccattcatcatggtgtggtggaggttgacgccgctgtcaccccagaggagcgccacctgtccaagatgcagcagaacggctacgaaaatccaacctacaagttctttgagcagatgcagaactag

SEQ ID NO: 51 - DNA, 258 bp, Homo sapiens
  source 1..258: mol_type = other DNA
atgctgcccggtttggcactgctcctgctggccgcctggacggctcgggcgctggaggtacccactgatggtaatgctggcctgctggctgaaccccagattgccatgttctgtggcagactgaacatgcacatgaatgtccagaatgggaagtgggattcagatccatcagggaccaaaacctgcattgataccaaggaaggcatcctgcgctacgaaaatccaacctacaagttctttgagcagatgcagaactag

SEQ ID NO: 52 - DNA, 816 bp, Homo sapiens
  source 1..816: mol_type = other DNA
atgctgcccggtttggcactgctcctgctggccgcctggacggctcgggcgctggaggtacccactgatggtaatgctggcctgctggctgaaccccagattgccatgttctgtggcagactgaacatgcacatgaatgtccagaatgggaagtgggattcagatccatcagggaccaaaacctgcattgataccaaggaaggcatcctgcagtattgccaagaagtctaccctgaactgcagatcaccaatgtggtagaagccaaccaaccagtgaccatccagaactggtgcaagcggggccgcaagcagtgcaagacccatccccactttgtgattccctaccgctgcttagttggtgagtttgtaagtgatgcccttctcgttcctgacaagtgcaaattcttacaccaggagaggatggatgtttgcgaaactcatcttcactggcacaccgtcgccaaagagacatgcagtgagaagagtaccaacttgcatgactacggcatgttgctgccctgcggaattgacaagttccgaggggtagagtttgtgtgttgcccactggctgaagaaagtgacaatgtggattctgctgatgcggaggaggatgactcggatgtctggtggggcggagcagacacagactatgcagatgggagtgaagacaaagtagtagaagtagcagaggaggaagaagtggctgaggtggaagaagaagaagccgatgatgacgaggagcgccacctgtccaagatgcagcagagcggctacgaaaatccaacctacaagttctttgagcagatgcagaactag

SEQ ID NO: 53 - DNA, 684 bp, Homo sapiens
  source 1..684: mol_type = other DNA
atgctgcccggtttggcactgctcctgctggccgcctggacggctcgggcgctggaggtacccactgatggtaatgctggcctgctggctgaaccccagattgccatgttctgtggcagactgaacatgcacatgaatgtccagaatgggaagtgggattcagatccatcagggaccaaaacctgcattgataccaaggaaggcatcctgcagtattgccaagaagtctaccctgaactgcagatcaccaatgtggtagaagccaacacagaaaacgaagttgagcctgttgatgcccgccctgctgccgaccgaggactgaccactcgaccaggttctgggttgacaaatatcaagacggaggagatctctgaagtgaagatggatgcagaattccgacatgactcaggatatgaagttcatcatcaaaaattggtgttctttacagaagatgtgggttcaaacaaaggtgcaatcattggactcatggtgggcggtgttgtcatagcgacagtgatcgtcatcaccttggtgatgctgaagaagaaacagtacacatccattcatcatggtgtggtggaggttgacgccgctgtcaccccagaggagcgccacctgtccaagatgcagcagaacggctacgaaaatccaacctacaagttctttgagcagatgcagaactag

SEQ ID NO: 54 - DNA, 499 bp, Homo sapiens
  source 1..499: mol_type = other DNA
atgctgcccggtttggcactgctcctgctggccgcctggacggctcgggcgctggagatacccactgatggtaatgctggcctgctggctgaaccccagattgccatgttctgtggcagactgaacatgcacatgaatgtccagaatgggaagtgggactcagatccatcagggaccaaaacctgcattgataccaaggaaggcatcctgcagtattgccaagaagtctaccctgaactgcagatcaccaatgtggtagaagccaaccaaccagtgaccatccagaactggtgcaagcggggccgcaagcagtgttgtcatagcgacagtgatcgtcatcaccttggtgatgctgaagaagaaacagtacacatccattcatcatggtgtggtggaggttgacgccgctgtcaccccagaggagcgccacctgtccaagatgcagcagaacggctacgaaaatccaacctacaagttctttgagcagatgcagaactag

SEQ ID NO: 55 - DNA, 898 bp, Homo sapiens
  source 1..898: mol_type = other DNA
atgctgcccggtttggcactgctcctgctggccgcctggacggcctcgtcacgtgttcaatatgctaaagaagtatgtccgcgcagaacagaaggacagacagcacaccctaaagcatttcgagcatgtgcgcatggtggatcccaagaaagccgctcagatccggtcccaggttatgacacacctccgtgtgatttatgagcgcatgaatcagtctctctccctgctctacaacgtgcctgcagtggccgaggagattcaggatgaagttgatgagctgcttcagaaagagcaaaactattcagatgacgtcttggccaacatgattagtgaaccaaggatcagttacggaaacgatgctctcatgccatctttgaccgaaacgaaaaccaccgtggagctccttcccgtgaatggagagttcagcctggacgatctccagccgtggcattcttttggggctgactctgtgccagccaacacagaaaacgaagttgagcctgttgatgcccgccctgctgccgaccgaggactgaccactcgaccaggttctgggttgacaaatatcaagacggaggagatctctgaagtgaagatggatgcagaattccgacatgactcaggatatgaagttcatcatcaaaaattggtgttctttgcagaagatgtgggttcaaacaaaggtgcaatcattggactcatggtgggtggtgttgtcatagcgacagtgatcgtcatcaccttggtgatgctgaagaagaaacagtacacatccattcatcatggtgtggtggaggttgacgccgctgtcaccccagaggagcgccacctgtccaagatgcagcagaacggctacgaaaatccaacctacaagttctttgagcagatgcagaactag

SEQ ID NO: 56 - DNA, 680 bp, Homo sapiens
  source 1..680: mol_type = other DNA
atgctgcccggtttggcactgctcctgcagtgggaggagattcaggatgaagttgatgaactgcttcagaaagagcaaaactattcagatgacgtcttggccaacatgattagtgaaccaaggatcagttacggaaacgatgctctcatgccatctttgaccgaaacgaaaaccaccgtggagctccttcccgtgaatggagagttcagcctggacgatctccagccgtggcattcttttggggctgactctgtgccagccaacacagaaaacgaagttgagcctgttgatgcccgccctgctgccgaccgaggactgaccactcgaccaggttctgggttgacaaatatcaagacggaggagatctctgaagtgaagatggatgcagaattccgacatgactcaggatatgaagttcatcatcaaaaattggtgttctttgcagaagatgtgggttcaaacaaaggtgcaatcattggactcatggtggcggtgttgtcatagcgacagtgatcgtcatcaccttggtgatgctgaagaagaaacagtacacatccattcatcatggtgtggtggaggttgacgccgctgtcaccccagaggagcgccacctgtccaagatgtggcagaacggctacgaaaatccaacctacaagttctttgagcagatgcagaactag

SEQ ID NO: 57 - DNA, 899 bp, Homo sapiens
  source 1..899: mol_type = other DNA
atgctgcccggtttggcactgctctgcaggctgttcctcctcggcctcgtcacgtgttcaatatgctaaagaagtatgtccgcgcagaacagaaggacagacagcacaccctaaagcatttcgagcatgtgcgcatggtggatcccaagaaagccgctcagatccggtcccaggttatgacacacctccgtgtgatttatgagcgcatgaatcagtctctctccctgctctacaacgtgcctgcagtggccgaggagattcaggatgaagttgatgagctgcttcagaaagagcaaaactattcagatgacgtcttggccaacatgattagtgaaccaaggatcagttacggaaacgatgctctcatgccatctttgaccgaaacgaaaaccaccgtggagctccttcccgtgaatggagagttcagcctggacgatctccagccgtggcattcttttggggctgactctgtgccagccaacacagaaaacgaagttgagcctgttgatgcccgccctgctgccgaccgaggactgaccactcgaccaggttctgggttgacaaatatcaagacggaggagatctctgaagtgaagatggatgcagaattccgacatgactcaggatatgaagttcatcatcaaaaattggtgttctttgcagaagatgtgggttcaaacaaaggtgcaatcattggactcatggtgggcggtgttgtcatagcgacagtgatcgtcatcaccttggtgatgctgaagaagaaacagtacacatccattcatcatggtgtggtggaggttgacgccgctgtcaccccagaggagcgccacctgtccaagatgcagcagaacggctacgaaaatccaacctacaagttctttgagcagatgcagaactag

SEQ ID NO: 58 - DNA, 541 bp, Homo sapiens
  source 1..541: mol_type = other DNA
atgctgcccggtttggcactgctcctgctggccgcctggacagctccttcccgtgaatggagagttcagcctggacgatctccagccgtggcattcttttggggctgactctgtgccagccaacacagaaaacgaagttgagcctgttgatgcccgccctgctgccgaccgaggactgaccactcgaccaggttctgggttgacaaatatcaagacggaggagatctctgaagtgaagatggatgcagaattccgacatgactcaggatatgaagttcatcatcaaaaattggtgttctttgcagaagatgtgggttcaaacaaaggtgcaatcattggactcatggtgggcggtgttgtcatagcgacagtgatcgtcatcaccttggtgatgctgaagaagaaacagtacacatccattcatcatggtgtggtggaggttgacgccgctgtcaccccagaggagcgccacctgtccaagatgcagcagaacggctacgaaaatccaacctacaagttctttgagcagatgcagaactag

SEQ ID NO: 59 - DNA, 274 bp, Homo sapiens
  source 1..274: mol_type = other DNA
atgctgcccggtttggcactgctcctgctggccgcctggacggctcgggcgctggaggtacccaatcattggactcatggtgggcggtgttgtcatagcgacagtgatcgtcatcaccttggtgatgctgaagaagaaacagtacacatccattcatcatggtgtggtggaggttgacgccgctgtcaccccagaggagcgccacctgtccaagatgcagcagaacggctacgaaaatccaacctacaagttctttgagcagatgcagaactag

SEQ ID NO: 60 - DNA, 515 bp, Homo sapiens
  source 1..515: mol_type = other DNA
atgctgcccggtttggcactgctcctgctggccgcctggacggctcgggcgctggaggtacccactgatggtaatgctggcctgctggctgaaccccagattgccatgttctgtggcagactgaacatgcacatgaatgtccagaatgggaagtgggattcagatccatcagggaccaaaacctgcattgataccaaggaaggcatcctgcagtatatgcagaattccgacatgactcaggatatgaagttcatcatcaaaaattggtgttctttgcagaagatgtgggttcaaacaaaggtgcaatcattggactcatggtgggcggtgttgtcatagcgacagtgatcgtcatcaccttggtgatgctgaagaagaaacagtacacatccattcatcatggtgtggtggaggttgacgccgctgtcaccccagaggagcgccacctgtccaagatgcagcagaacggctacgaaaatccaacctacaagttctttgagcagatgcagaactag

SEQ ID NO: 61 - DNA, 888 bp, Homo sapiens
  source 1..888: mol_type = other DNA
atgctgcccggtttggcactgctcctgctggccgcctggacggctcgggcgctggaggtacccactgatggtaatgctggcctgctggctgaaccccagattgccatgttctgtggcagactgaacatgcacatgaatgtccagaatgggaagtgggattcagatccatcagggaccaaaacctgcattgataccaaggaaggcatcctgcagtattgccaagaagtctaccctgaactgcagatcaccaatgtggtagaagccaaccaaccagtgaccatccagaactggtgcaagcggggccgcaagcagtgcaagacccatccccactttgtgattccctaccgctgcttagttggtgagtttgtaagtgatgcccttctcgttcctgacaagtgcaaattcttacaccaggagaggatggatgtttgcgaaactcatcttcactggcacaccgtcgccaaagagacatgcagtgagaagagtaccaacttgcatgactacggcatgttgctgccctgcggaattgacaagttccgaggggtagagtttgtgtgttgcccactggctgaagaaagtgacaatgtggattctgctgatgcggaggaggatgactcggatgtctggtggggcggagcagacacagactatgcagatgggagtgaagacaaaggtgcaatcattggactcatggtgggcggtgttgtcatagcgacagtgatcgtcatcaccttggtgatgctgaagaagaaacagtacacatccattcatcatggtgtggtggaggttgacgccgctgtcaccccagaggagcgccacctgtccaagatgcagcagaacggctacgaaaatccaacctacaagttctttgagcagatgcagaactag

SEQ ID NO: 62 - DNA, 757 bp, Homo sapiens
  source 1..757: mol_type = other DNA
atgctgcccggtttggcactgctcctgctggccgcctggacggctcgggcgctggaggtacccactgatggtaatgctggcctgctggctgaaccccagattgccatgttctgtggcagactgaacatgcacatgaatgtccagaatgggaagtgggattcagatccatcagggaccaaaacctgcattgataccaaggatcagttacggaaacgatgctctcatgccatctttgaccgaaacgaaaaccaccgtggagctccttcccgtgaatggagagttcagcctggacgatctccagccgtggcattcttttggggctgactctgtgccagccaacacagaaaacgaagttgagcctgttgatgcccgccctgctgccgaccgaggactgaccactcgaccaggttctgggttgacaaatatcaagacggaggagatctctgaagtgaagatggatgcagaattccgacatgactcaggatatgaagttcatcatcaaaaattggtgttctttgcagaagatgtgggttcaaacaaaggtgcaatcattggactcatggtgggcggtgttgtcatagcgacagtgatcgtcatcaccttggtgatgctgaagaagaaacagtacacatccattcatcatggtgtggtggaggttgacgccgctgtcaccccagaggagcgccacctgtccaagatgcagcagaacggctacgaaaatccaacctacaagttctttgagcagatgcagaactag

SEQ ID NO: 63 - DNA, 1879 bp, Homo sapiens
  source 1..1879: mol_type = other DNA
atgctgcccggtttggcactgctcctgctggccgcctggacggctcgggcgctggaggtacccactgatggtaatgctggcctgctggctgaaccccagattgccatgttctgtggcagactgaacatgcacatgaatgtccagaatgggaagtgggattcagatccatcagggaccaaaacctgcattgataccaaggaaggcatcctgcagtattgccaagaagtctaccctgaactgcagatcaccaatgtggtagaagccaaccaaccagtgaccatccagaactggtgcaagcggggccgcaagcagtgcaagacccatccccactttgtgattccctaccgctgcttagttggtgagtttgtaagtgatgcccttctcgttcctgacaagtgcaaattcttacaccaggagaggatggatgtttgcgaaactcatcttcactggcacaccgtcgccaaagagacatgcagtgagaagagtaccaacttgcatgactacggcatgttgctgccctgcggaattgacaagttccgaggggtagagtttgtgtgttgcccactggctgaagaaagtgacaatgtggattctgctgatgcggaggaggatgactcggatgtctggtggggcggagcagacacagactatgcagatgggagtgaagacaaagtagtagaagtagcagaggaggaagaagtggctgaggtggaagaagaagaagccgatgatgacgaggacgatgaggatggtgatgaggtagaggaagaggctgaggaaccctacgaagaagccacagagagaaccaccagcattgccaccaccaccaccaccaccacagagtctgtggaagaggtggttcgagaggtgtgctctgaacaagccgagacggggccgtgccgagcaatgatctcccgctggtactttgatgtgactgaagggaagtgtgccccattcttttacggcggatgtggcggcaaccggaacaactttgacacagaagagtactgcatggccgtgtgtggcagcgccattcctacaacagcagccagtacccctgatgccgttgacaagtatctcgagacacctggggatgagaatgaacatgcccatttccagaaagccaaagagaggcttgaggccaagcaccgagagagaatgtcccaggtcatgagagaatgggaagaggcagaacgtcaagcaaagaacttgcctaaagctgataagaaggcagttatccagcatttccaggagaaagtggaatctttggaacaggaagcagccaacgagagacagcagctggtggagacacacatggccagagtggaagccatgctcaatgaccgccgccgcctggccctggagaactacatcaccgctctgcaggctgttcctcctcggcctcgtcacgtgttcaatatgctaaagaagtatgtacgcgcagaacagaaggacagacagcacaccctaaagcatttcgagcatgtgcgcatggtggatcccaagaaagccgctcagatccggtcccaggttatgacactcctccgtgtgatttatgagcgcatgaatcagtctctctccctgctctacaacgtgcctgcagtggccgaggagattcaggatgaagttggtgttctttgcagaagatgtgggttcaaacaaaggtgcaatcattggactcatggtgggcggtgttgtcatagcgacagtgatcgtcatcaccttggtgatgctgaagaagaaacagtacacatccattcatcatggtgtggtggaggttgacgccgctgtcaccccagaggagcgccacctgtccaagatgcagcagaacggctacgaaaatccaacctacaagttctttgagcagatgcagaactag

SEQ ID NO: 64 - DNA, 144 bp, Homo sapiens
  source 1..144: mol_type = other DNA
atgctgcccggtttggcactgctcctgctggccgcctggacggctcgggcgctggaggtacccactgatggtaatgctggcctgctggctgaaccccagattgccatgttctgtggcagaaagttctttgagcagatgcagaac

SEQ ID NO: 65 - RNA, 21 nt, synthetic construct
  misc_feature 1..21: note = Synthetic
  source 1..21: mol_type = other RNA
gacccaattaagtcctacttt

SEQ ID NO: 66 - RNA, 21 nt, synthetic construct
  misc_feature 1..21: note = Synthetic
  source 1..21: mol_type = other RNA
tctcctgattatttatcacat

SEQ ID NO: 67 - RNA, 21 nt, synthetic construct
  misc_feature 1..21: note = Synthetic
  source 1..21: mol_type = other RNA
cctgaacttgaattaatccat

SEQ ID NO: 68 - RNA, 21 nt, synthetic construct
  misc_feature 1..21: note = Synthetic
  source 1..21: mol_type = other RNA
ggttcaaacaaaggtgcaatt

SEQ ID NO: 69 - RNA, 21 nt, synthetic construct
  misc_feature 1..21: note = Synthetic
  source 1..21: mol_type = other RNA
tttactcattatcgccttttg

SEQ ID NO: 70 - RNA, 21 nt, synthetic construct
  misc_feature 1..21: note = Synthetic
  source 1..21: mol_type = other RNA
atttagctgtatcaaactagt

SEQ ID NO: 71 - RNA, 21 nt, synthetic construct
  misc_feature 1..21: note = Synthetic
  source 1..21: mol_type = other RNA
agtattcctttcctgatcact

SEQ ID NO: 72 - RNA, 21 nt, synthetic construct
  misc_feature 1..21: note = Synthetic
  source 1..21: mol_type = other RNA
gcttatgacatgatcgctttc

SEQ ID NO: 73 - RNA, 21 nt, synthetic construct
  misc_feature 1..21: note = Synthetic
  source 1..21: mol_type = other RNA
aagatgtgtcttcaatttgta

SEQ ID NO: 74 - RNA, 21 nt, synthetic construct
  misc_feature 1..21: note = Synthetic
  source 1..21: mol_type = other RNA
gcaaaaccattgcttcactat

SEQ ID NO: 75 - RNA, 21 nt, synthetic construct
  misc_feature 1..21: note = Synthetic
  source 1..21: mol_type = other RNA
atttactcattatcgcctttt

SEQ ID NO: 76 - RNA, 21 nt, synthetic construct
  misc_feature 1..21: note = Synthetic
  source 1..21: mol_type = other RNA
tactcattatcgccttttgat

SEQ ID NO: 77 - RNA, 21 nt, synthetic construct
  misc_feature 1..21: note = Synthetic
  source 1..21: mol_type = other RNA
tgcctgaacttgaattaatct

SEQ ID NO: 78 - RNA, 21 nt, synthetic construct
  misc_feature 1..21: note = Synthetic
  source 1..21: mol_type = other RNA
ctgaacttgaattaatccaca

SEQ ID NO: 79 - RNA, 21 nt, synthetic construct
  misc_feature 1..21: note = Synthetic
  source 1..21: mol_type = other RNA
tttagctgtatcaaactagtt

SEQ ID NO: 80 - RNA, 21 nt, synthetic construct
  misc_feature 1..21: note = Synthetic
  source 1..21: mol_type = other RNA
gaatagattctctcctgatta

SEQ ID NO: 81 - RNA, 21 nt, synthetic construct
  misc_feature 1..21: note = Synthetic
  source 1..21: mol_type = other RNA
tcctgattatttatcacatat

SEQ ID NO: 82 - RNA, 21 nt, synthetic construct
  misc_feature 1..21: note = Synthetic
  source 1..21: mol_type = other RNA
cccaattaagtcctactttat

SEQ ID NO: 83 - RNA, 21 nt, synthetic construct
  misc_feature 1..21: note = Synthetic
  source 1..21: mol_type = other RNA
catatgctttaagaatcgatt

SEQ ID NO: 84 - RNA, 21 nt, synthetic construct
  misc_feature 1..21: note = Synthetic
  source 1..21: mol_type = other RNA
cttctcttgcctaagtattct

SEQ ID NO: 85 - RNA, 21 nt, synthetic construct
  misc_feature 1..21: note = Synthetic
  source 1..21: mol_type = other RNA
cattgcttatgacatgatcgt

SEQ ID NO: 86 - RNA, 21 nt, synthetic construct
  misc_feature 1..21: note = Synthetic
  source 1..21: mol_type = other RNA
cttatgacatgatcgctttct

SEQ ID NO: 87 - RNA, 21 nt, synthetic construct
  misc_feature 1..21: note = Synthetic
  source 1..21: mol_type = other RNA
tatgacatgatcgctttctat

SEQ ID NO: 88 - RNA, 21 nt, synthetic construct
  misc_feature 1..21: note = Synthetic
  source 1..21: mol_type = other RNA
tgacatgatcgctttctacat

SEQ ID NO: 89 - RNA, 21 nt, synthetic construct
  misc_feature 1..21: note = Synthetic
  source 1..21: mol_type = other RNA
gatcgctttctacactgtatt

SEQ ID NO: 90 - RNA, 21 nt, synthetic construct
  misc_feature 1..21: note = Synthetic
  source 1..21: mol_type = other RNA
aaaactattcagatgacgtct

SEQ ID NO: 91 - RNA, 21 nt, synthetic construct
  misc_feature 1..21: note = Synthetic
  source 1..21: mol_type = other RNA
aaactattcagatgacgtctt

SEQ ID NO: 92 - RNA, 21 nt, synthetic construct
  misc_feature 1..21: note = Synthetic
  source 1..21: mol_type = other RNA
acgaaaatccaacctacaagt

SEQ ID NO: 93 - RNA, 21 nt, synthetic construct
  misc_feature 1..21: note = Synthetic
  source 1..21: mol_type = other RNA
tgcttctcttgcctaagtatt

SEQ ID NO: 94 - RNA, 21 nt, synthetic construct
  misc_feature 1..21: note = Synthetic
  source 1..21: mol_type = other RNA
tgcttatgacatgatcgcttt

SEQ ID NO: 95 - RNA, 21 nt, synthetic construct
  misc_feature 1..21: note = Synthetic
  source 1..21: mol_type = other RNA
tgatcgctttctacactgtat

SEQ ID NO: 96 - RNA, 21 nt, synthetic construct
  misc_feature 1..21: note = Synthetic
  source 1..21: mol_type = other RNA
atcgctttctacactgtatta

SEQ ID NO: 97 - RNA, 21 nt, synthetic construct
  misc_feature 1..21: note = Synthetic
  source 1..21: mol_type = other RNA
tctttgaccgaaacgaaaact

SEQ ID NO: 98 - RNA, 21 nt, synthetic construct
  misc_feature 1..21: note = Synthetic
  source 1..21: mol_type = other RNA
gttctgggttgacaaatatca

SEQ ID NO: 99 - RNA, 21 nt, synthetic construct
  misc_feature 1..21: note = Synthetic
  source 1..21: mol_type = other RNA
tgggttgacaaatatcaagat

SEQ ID NO: 100 - RNA, 21 nt, synthetic construct
  misc_feature 1..21: note = Synthetic
  source 1..21: mol_type = other RNA
gatttactcattatcgccttt

SEQ ID NO: 101 - RNA, 21 nt, synthetic construct
  misc_feature 1..21: note = Synthetic
  source 1..21: mol_type = other RNA
tcctttcctgatcactatgca

SEQ ID NO: 102 - RNA, 21 nt, synthetic construct
  misc_feature 1..21: note = Synthetic
  source 1..21: mol_type = other RNA
ctttcctgatcactatgcatt

SEQ ID NO: 103 - RNA, 21 nt, synthetic construct
  misc_feature 1..21: note = Synthetic
  source 1..21: mol_type = other RNA
attgcttatgacatgatcgct

SEQ ID NO: 104 - RNA, 21 nt, synthetic construct
  misc_feature 1..21: note = Synthetic
  source 1..21: mol_type = other RNA
tctttaaccagtctgaagttt

SEQ ID NO: 105 - RNA, 21 nt, synthetic construct
  misc_feature 1..21: note = Synthetic
  source 1..21: mol_type = other RNA
ggatcagttacggaaacgatt

SEQ ID NO: 106 - RNA, 21 nt, synthetic construct
  misc_feature 1..21: note = Synthetic
  source 1..21: mol_type = other RNA
ctgggttgacaaatatcaaga

SEQ ID NO: 107 - RNA, 21 nt, synthetic construct
  misc_feature 1..21: note = Synthetic
  source 1..21: mol_type = other RNA
atgatttactcattatcgcct

SEQ ID NO: 108 - RNA, 21 nt, synthetic construct
  misc_feature 1..21: note = Synthetic
  source 1..21: mol_type = other RNA
cttgtggtttgtgacccaatt

SEQ ID NO: 109 - RNA, 21 nt, synthetic construct
  misc_feature 1..21: note = Synthetic
  source 1..21: mol_type = other RNA
atatgctttaagaatcgatgt

SEQ ID NO: 110 - RNA, 21 nt, synthetic construct
  misc_feature 1..21: note = Synthetic
  source 1..21: mol_type = other RNA
tttgtccacgtatctttgggt

SEQ ID NO: 111 - RNA, 21 nt, synthetic construct
  misc_feature 1..21: note = Synthetic
  source 1..21: mol_type = other RNA
tcattgtaagcacttttacgt

SEQ ID NO: 112 - RNA, 21 nt, synthetic construct
  misc_feature 1..21: note = Synthetic
  source 1..21: mol_type = other RNA
ggccaacatgattagtgaact

SEQ ID NO: 113 - RNA, 21 nt, synthetic construct
  misc_feature 1..21: note = Synthetic
  source 1..21: mol_type = other RNA
gatcagttacggaaacgatgt

SEQ ID NO: 114 - RNA, 21 nt, synthetic construct
  misc_feature 1..21: note = Synthetic
  source 1..21: mol_type = other RNA
tacggaaacgatgctctcatt

SEQ ID NO: 115 - RNA, 21 nt, synthetic construct
  misc_feature 1..21: note = Synthetic
  source 1..21: mol_type = other RNA
tgatttactcattatcgcctt

SEQ ID NO: 116 - RNA, 21 nt, synthetic construct
  misc_feature 1..21: note = Synthetic
  source 1..21: mol_type = other RNA
gtagatgcctgaacttgaatt

SEQ ID NO: 117 - RNA, 21 nt, synthetic construct
  misc_feature 1..21: note = Synthetic
  source 1..21: mol_type = other RNA
ttgtatattattcttgtggtt

SEQ ID NO: 118 - RNA, 21 nt, synthetic construct
  misc_feature 1..21: note = Synthetic
  source 1..21: mol_type = other RNA
attgctgcttctgctatattt

SEQ ID NO: 119 - RNA, 21 nt, synthetic construct
  misc_feature 1..21: note = Synthetic
  source 1..21: mol_type = other RNA
tgctatatttgtgatatagga

SEQ ID NO: 120 - RNA, 21 nt, synthetic construct
  misc_feature 1..21: note = Synthetic
  source 1..21: mol_type = other RNA
acacattaggcattgagactt

SEQ ID NO: 121 - RNA, 21 nt, synthetic construct
  misc_feature 1..21: note = Synthetic
  source 1..21: mol_type = other RNA
aagaatccctgttcattgtaa

SEQ ID NO: 122 - RNA, 21 nt, synthetic construct
  misc_feature 1..21: note = Synthetic
  source 1..21: mol_type = other RNA
cattgtaagcacttttacggt

SEQ ID NO: 123 - RNA, 21 nt, synthetic construct
  misc_feature 1..21: note = Synthetic
  source 1..21: mol_type = other RNA
ttgcttatgacatgatcgctt

SEQ ID NO: 124 - RNA, 21 nt, synthetic construct
  misc_feature 1..21: note = Synthetic
  source 1..21: mol_type = other RNA
caaggatcagttacggaaact

SEQ ID NO: 125 - RNA, 21 nt, synthetic construct
  misc_feature 1..21: note = Synthetic
  source 1..21: mol_type = other RNA
aggttctgggttgacaaatat

SEQ ID NO: 126 - RNA, 21 nt, synthetic construct
  misc_feature 1..21: note = Synthetic
  source 1..21: mol_type = other RNA
aagatgtgggttcaaacaaat

SEQ ID NO: 127 - RNA, 21 nt, synthetic construct
  misc_feature 1..21: note = Synthetic
  source 1..21: mol_type = other RNA
ctgaagaagaaacagtacaca

SEQ ID NO: 128 - RNA, 21 nt, synthetic construct
  misc_feature 1..21: note = Synthetic
  source 1..21: mol_type = other RNA
aagttggacagcaaaaccatt

SEQ ID NO: 129 - RNA, 21 nt, synthetic construct
  misc_feature 1..21: note = Synthetic
  source 1..21: mol_type = other RNA
atcggtgtccatttatagaat

SEQ ID NO: 130 - RNA, 21 nt, synthetic construct
  misc_feature 1..21: note = Synthetic
  source 1..21: mol_type = other RNA
tcggtgtccatttatagaata

SEQ ID NO: 131 - RNA, 21 nt, synthetic construct
  misc_feature 1..21: note = Synthetic
  source 1..21: mol_type = other RNA
gctgtaacacaagtagatgct

SEQ ID NO: 132 - RNA, 21 nt, synthetic construct
  misc_feature 1..21: note = Synthetic
  source 1..21: mol_type = other RNA
aagtagatgcctgaacttgaa

SEQ ID NO: 133 - RNA, 21 nt, synthetic construct
  misc_feature 1..21: note = Synthetic
  source 1..21: mol_type = other RNA
ttgtggtttgtgacccaatta

SEQ ID NO: 134 - RNA, 21 nt, synthetic construct
  misc_feature 1..21: note = Synthetic
  source 1..21: mol_type = other RNA
gtttgtgacccaattaagtct

SEQ ID NO: 135 - RNA, 21 nt, synthetic construct
  misc_feature 1..21: note = Synthetic
  source 1..21: mol_type = other RNA
gtgacccaattaagtcctact

SEQ ID NO: 136 - RNA, 21 nt, synthetic construct
  misc_feature 1..21: note = Synthetic
  source 1..21: mol_type = other RNA
tatgctttaagaatcgatggt

SEQ ID NO: 137 - RNA, 21 nt, synthetic construct
  misc_feature 1..21: note = Synthetic
  source 1..21: mol_type = other RNA
tttgtgatataggaattaaga

SEQ ID NO: 138 - RNA, 21 nt, synthetic construct
  misc_feature 1..21: note = Synthetic
  source 1..21: mol_type = other RNA
aaagaatccctgttcattgta

SEQ ID NO: 139 - RNA, 21 nt, synthetic construct
  misc_feature 1..21: note = Synthetic
  source 1..21: mol_type = other RNA
tgattgtacagaatcattgct

SEQ ID NO: 140 - RNA, 21 nt, synthetic construct
  misc_feature 1..21: note = Synthetic
  source 1..21: mol_type = other RNA
tgcctggacaaacccttcttt

SEQ ID NO: 141 - RNA, 21 nt, synthetic construct
  misc_feature 1..21: note = Synthetic
  source 1..21: mol_type = other RNA
gagcaaaactattcagatgat

SEQ ID NO: 142 - RNA, 21 nt, synthetic construct
  misc_feature 1..21: note = Synthetic
  source 1..21: mol_type = other RNA
agtgaaccaaggatcagttat

SEQ ID NO: 143 - RNA, 21 nt, synthetic construct
  misc_feature 1..21: note = Synthetic
  source 1..21: mol_type = other RNA
tgaaccaaggatcagttacgt

SEQ ID NO: 144 - RNA, 21 nt, synthetic construct
  misc_feature 1..21: note = Synthetic
  source 1..21: mol_type = other RNA
cagttacggaaacgatgctct

SEQ ID NO: 145 - RNA, 21 nt, synthetic construct
  misc_feature 1..21: note = Synthetic
  source 1..21: mol_type = other RNA
agaagatgtgggttcaaacaa

SEQ ID NO: 146 - RNA, 21 nt, synthetic construct
  misc_feature 1..21: note = Synthetic
  source 1..21: mol_type = other RNA
cctctgaagttggacagcaaa

SEQ ID NO: 147 - RNA, 21 nt, synthetic construct
  misc_feature 1..21: note = Synthetic
  source 1..21: mol_type = other RNA
ttatgatttactcattatcgt

SEQ ID NO: 148 - RNA, 21 nt, synthetic construct
  misc_feature 1..21: note = Synthetic
  source 1..21: mol_type = other RNA
acagctgtgctgtaacacaat

SEQ ID NO: 149 - RNA, 21 nt, synthetic construct
  misc_feature 1..21: note = Synthetic
  source 1..21: mol_type = other RNA
tgtgacccaattaagtcctat

SEQ ID NO: 150 - RNA, 21 nt, synthetic construct
  misc_feature 1..21: note = Synthetic
  source 1..21: mol_type = other RNA
tacatatgctttaagaatcga

SEQ ID NO: 151 - RNA, 21 nt, synthetic construct
  misc_feature 1..21: note = Synthetic
  source 1..21: mol_type = other RNA
gtaaataaatacattcttgga

SEQ ID NO: 152 - RNA, 21 nt, synthetic construct
  misc_feature 1..21: note = Synthetic
  source 1..21: mol_type = other RNA
tcagttacggaaacgatgctt

SEQ ID NO: 153 - RNA, 21 nt, synthetic construct
  misc_feature 1..21: note = Synthetic
  source 1..21: mol_type = other RNA
cttcccgtgaatggagagttt

SEQ ID NO: 154 - RNA, 21 nt, synthetic construct
  misc_feature 1..21: note = Synthetic
  source 1..21: mol_type = other RNA
agttggacagcaaaaccattt

SEQ ID NO: 155 - RNA, 21 nt, synthetic construct
  misc_feature 1..21: note = Synthetic
  source 1..21: mol_type = other RNA
cccatcggtgtccatttatat

SEQ ID NO: 156 - RNA, 21 nt, synthetic construct
  misc_feature 1..21: note = Synthetic
  source 1..21: mol_type = other RNA
tgcacacattaggcattgaga

SEQ ID NO: 157 - RNA, 21 nt, synthetic construct
  misc_feature 1..21: note = Synthetic
  source 1..21: mol_type = other RNA
ccaacatgattagtgaaccaa

SEQ ID NO: 158 - RNA, 21 nt, synthetic construct
  misc_feature 1..21: note = Synthetic
  source 1..21: mol_type = other RNA
atgattagtgaaccaaggatt

SEQ ID NO: 159 - RNA, 21 nt, synthetic construct
  misc_feature 1..21: note = Synthetic
  source 1..21: mol_type = other RNA
ttagtgaaccaaggatcagtt

SEQ ID NO: 160 - RNA, 21 nt, synthetic construct
  misc_feature 1..21: note = Synthetic
  source 1..21: mol_type = other RNA
aaccaaggatcagttacggaa

SEQ ID NO: 161 - RNA, 21 nt, synthetic construct
  misc_feature 1..21: note = Synthetic
  source 1..21: mol_type = other RNA
gttacggaaacgatgctctca

SEQ ID NO: 162 - RNA, 21 nt, synthetic construct
  misc_feature 1..21: note = Synthetic
  source 1..21: mol_type = other RNA
gatgcagaattccgacatgat

SEQ ID NO: 163 - RNA, 21 nt, synthetic construct
  misc_feature 1..21: note = Synthetic
  source 1..21: mol_type = other RNA
ttggacagcaaaaccattgct

SEQ ID NO: 164 - RNA, 21 nt, synthetic construct
  misc_feature 1..21: note = Synthetic
  source 1..21: mol_type = other RNA
aaaccattgcttcactaccca

SEQ ID NO: 165 - RNA, 21 nt, synthetic construct
  misc_feature 1..21: note = Synthetic
  source 1..21: mol_type = other RNA
ccatcggtgtccatttataga

SEQ ID NO: 166 - RNA, 21 nt, synthetic construct
  misc_feature 1..21: note = Synthetic
  source 1..21: mol_type = other RNA
ttatcgccttttgacagctgt

SEQ ID NO: 167 - RNA, 21 nt, synthetic construct
  misc_feature 1..21: note = Synthetic
  source 1..21: mol_type = other RNA
atcgccttttgacagctgtgt

SEQ ID NO: 168 - RNA, 21 nt, synthetic construct
  misc_feature 1..21: note = Synthetic
  source 1..21: mol_type = other RNA
acacaagtagatgcctgaact

SEQ ID NO: 169 - RNA, 21 nt, synthetic construct
  misc_feature 1..21: note = Synthetic
  source 1..21: mol_type = other RNA
tgtggtttgtgacccaattaa

SEQ ID NO: 170 - RNA, 21 nt, synthetic construct
  misc_feature 1..21: note = Synthetic
  source 1..21: mol_type = other RNA
gggatgcttcatgtgaacgtt

SEQ ID NO: 171 - RNA, 21 nt, synthetic construct
  misc_feature 1..21: note = Synthetic
  source 1..21: mol_type = other RNA
tgtgcacacattaggcattga

SEQ ID NO: 172 - RNA, 21 nt, synthetic construct
  misc_feature 1..21: note = Synthetic
  source 1..21: mol_type = other RNA
aaatggaagtggcaatataat

SEQ ID NO: 173 - RNA, 21 nt, synthetic construct
  misc_feature 1..21: note = Synthetic
  source 1..21: mol_type = other RNA
atggaagtggcaatataaggt

SEQ ID NO: 174 - RNA, 21 nt, synthetic construct
  misc_feature 1..21: note = Synthetic
  source 1..21: mol_type = other RNA
tgcccgagatcctgttaaact

SEQ ID NO: 175 - RNA, 21 nt, synthetic construct
  misc_feature 1..21: note = Synthetic
  source 1..21: mol_type = other RNA
attagtgaaccaaggatcagt

SEQ ID NO: 176 - RNA, 21 nt, synthetic construct
  misc_feature 1..21: note = Synthetic
  source 1..21: mol_type = other RNA
gaaccaaggatcagttacgga

SEQ ID NO: 177 - RNA, 21 nt, synthetic construct
  misc_feature 1..21: note = Synthetic
  source 1..21: mol_type = other RNA
aaggatcagttacggaaacga

SEQ ID NO: 178 - RNA, 21 nt, synthetic construct
  misc_feature 1..21: note = Synthetic
  source 1..21: mol_type = other RNA
caacacagaaaacgaagttga

SEQ ID NO: 179 - RNA, 21 nt, synthetic construct
  misc_feature 1..21: note = Synthetic
  source 1..21: mol_type = other RNA
tgggttcaaacaaaggtgcaa

SEQ ID NO: 180 - RNA, 21 nt, synthetic construct
  misc_feature 1..21: note = Synthetic
  source 1..21: mol_type = other RNA
cagtgatcgtcatcaccttgt

SEQ ID NO: 181 - RNA, 21 nt, synthetic construct
  misc_feature 1..21: note = Synthetic
  source 1..21: mol_type = other RNA
acccatcggtgtccatttata

SEQ ID NO: 182 - RNA, 21 nt, synthetic construct
  misc_feature 1..21: note = Synthetic
  source 1..21: mol_type = other RNA
tcttgtggtttgtgacccaat

SEQ ID NO: 183 - RNA, 21 nt, synthetic construct
  misc_feature 1..21: note = Synthetic
  source 1..21: mol_type = other RNA
tttgtgacccaattaagtcct

SEQ ID NO: 184 - RNA, 21 nt, synthetic construct
  misc_feature 1..21: note = Synthetic
  source 1..21: mol_type = other RNA
ttgtgacccaattaagtccta

SEQ ID NO: 185 - RNA, 21 nt, synthetic construct
  misc_feature 1..21: note = Synthetic
  source 1..21: mol_type = other RNA
ttcagatgacgtcttggccaa

SEQ ID NO: 186 - RNA, 21 nt, synthetic construct
  misc_feature 1..21: note = Synthetic
  source 1..21: mol_type = other RNA
atcagttacggaaacgatgct

SEQ ID NO: 187 - RNA, 21 nt, synthetic construct
  misc_feature 1..21: note = Synthetic
  source 1..21: mol_type = other RNA
tggatgcagaattccgacatt

SEQ ID NO: 188 - RNA, 21 nt, synthetic construct
  misc_feature 1..21: note = Synthetic
  source 1..21: mol_type = other RNA
gtccaagatgcagcagaacgt

SEQ ID NO: 189 - RNA, 21 nt, synthetic construct
  misc_feature 1..21: note = Synthetic
  source 1..21: mol_type = other RNA
tacccatcggtgtccatttat

SEQ ID NO: 190 - RNA, 21 nt, synthetic construct
  misc_feature 1..21: note = Synthetic
  source 1..21: mol_type = other RNA
ttttgacagctgtgctgtaat

SEQ ID NO: 191 - RNA, 21 nt, synthetic construct
  misc_feature 1..21: note = Synthetic
  source 1..21: mol_type = other RNA
ttgacagctgtgctgtaacat

SEQ ID NO: 192 - RNA, 21 nt, synthetic construct
  misc_feature 1..21: note = Synthetic
  source 1..21: mol_type = other RNA
agctgtgctgtaacacaagta

SEQ ID NO: 193 - RNA, 21 nt, synthetic construct
  misc_feature 1..21: note = Synthetic
  source 1..21: mol_type = other RNA
gttttatgtgcacacattagt

SEQ ID NO: 194 - RNA, 21 nt, synthetic construct
  misc_feature 1..21: note = Synthetic
  source 1..21: mol_type = other RNA
ttcaattaccaagaattctct

SEQ ID NO: 195 - RNA, 21 nt, synthetic construct
  misc_feature 1..21: note = Synthetic
  source 1..21: mol_type = other RNA
cacacatcagtaatgtattct

SEQ ID NO: 196 - RNA, 21 nt, synthetic construct
  misc_feature 1..21: note = Synthetic
  source 1..21: mol_type = other RNA
tggtctctatactacattatt

SEQ ID NO: 197 - RNA, 21 nt, synthetic construct
  misc_feature 1..21: note = Synthetic
  source 1..21: mol_type = other RNA
acccgttttatgatttactca

SEQ ID NO: 198 - RNA, 21 nt, synthetic construct
  misc_feature 1..21: note = Synthetic
  source 1..21: mol_type = other RNA
tacgaaaatccaacctacaat

SEQ ID NO: 199 - RNA, 21 nt, synthetic construct
  misc_feature 1..21: note = Synthetic
  source 1..21: mol_type = other RNA
tccacacatcagtaatgtatt

SEQ ID NO: 200 - RNA, 21 nt, synthetic construct
  misc_feature 1..21: note = Synthetic
  source 1..21: mol_type = other RNA
ctggtcttcaattaccaagaa

SEQ ID NO: 201 - RNA, 21 nt, synthetic construct
  misc_feature 1..21: note = Synthetic
  source 1..21: mol_type = other RNA
gccatctttgaccgaaacgaa

SEQ ID NO: 202 - RNA, 21 nt, synthetic construct
  misc_feature 1..21: note = Synthetic
  source 1..21: mol_type = other RNA
ccatctttgaccgaaacgaaa

SEQ ID NO: 203 - RNA, 21 nt, synthetic construct
  misc_feature 1..21: note = Synthetic
  source 1..21: mol_type = other RNA
ctacgaaaatccaacctacaa

SEQ ID NO: 204 - RNA, 21 nt, synthetic construct
  misc_feature 1..21: note = Synthetic
  source 1..21: mol_type = other RNA
atccacacatcagtaatgtat

SEQ ID NO: 205 - RNA, 21 nt, synthetic construct
  misc_feature 1..21: note = Synthetic
  source 1..21: mol_type = other RNA
catgccatctttgaccgaaat

SEQ ID NO: 206 - RNA, 21 nt, synthetic construct
  misc_feature 1..21: note = Synthetic
  source 1..21: mol_type = other RNA
ggctacgaaaatccaacctat

SEQ ID NO: 207 - RNA, 21 nt, synthetic construct
  misc_feature 1..21: note = Synthetic
  source 1..21: mol_type = other RNA
tcatgccatctttgaccgaaa

SEQ ID NO: 208 - RNA, 21 nt, synthetic construct
  misc_feature 1..21: note = Synthetic
  source 1..21: mol_type = other RNA
cagtacacatccattcatcat

SEQ ID NO: 209 - RNA, 21 nt, synthetic construct
  misc_feature 1..21: note = Synthetic
  source 1..21: mol_type = other RNA
aacggctacgaaaatccaact

SEQ ID NO: 210 - RNA, 21 nt, synthetic construct
  misc_feature 1..21: note = Synthetic
  source 1..21: mol_type = other RNA
gaagtttcatttatgatacaa

SEQ ID NO: 211 - RNA, 21 nt, synthetic construct
  misc_feature 1..21: note = Synthetic
  source 1..21: mol_type = other RNA
atgccatctttgaccgaaact

SEQ ID NO: 212 - RNA, 21 nt, synthetic construct
  misc_feature 1..21: note = Synthetic
  source 1..21: mol_type = other RNA
gaacggctacgaaaatccaat

SEQ ID NO: 213 - RNA, 21 nt, synthetic construct
  misc_feature 1..21: note = Synthetic
  source 1..21: mol_type = other RNA
tcttcgtgcctgttttatgtt

SEQ ID NO: 214 - RNA, 21 nt, synthetic construct
  misc_feature 1..21: note = Synthetic
  source 1..21: mol_type = other RNA
ttgcccgagatcctgttaaat

SEQ ID NO: 215 - RNA, 21 nt, synthetic construct
  misc_feature 1..21: note = Synthetic
  source 1..21: mol_type = other RNA
cttcgtgcctgttttatgtgt

SEQ ID NO: 216 - RNA, 21 nt, synthetic construct
  misc_feature 1..21: note = Synthetic
  source 1..21: mol_type = other RNA
gcgccatgtcccaaagtttat

SEQ ID NO: 217 - RNA, 21 nt, synthetic construct
  misc_feature 1..21: note = Synthetic
  source 1..21: mol_type = other RNA
gtcatagcgacagtgatcgtt

SEQ ID NO: 218 - RNA, 21 nt, synthetic construct
  misc_feature 1..21: note = Synthetic
  source 1..21: mol_type = other RNA
gctacgaaaatccaacctaca

SEQ ID NO: 219 - RNA, 21 nt, synthetic construct
  misc_feature 1..21: note = Synthetic
  source 1..21: mol_type = other RNA
atagcgacagtgatcgtcatt

SEQ ID NO: 220 - RNA, 21 nt, synthetic construct
  misc_feature 1..21: note = Synthetic
  source 1..21: mol_type = other RNA
cttgcccgagatcctgttaaa

SEQ ID NO: 221 - RNA, 21 nt, synthetic construct
  misc_feature 1..21: note = Synthetic
  source 1..21: mol_type = other RNA
ctcatgccatctttgaccgaa

SEQ ID NO: 222 - RNA, 21 nt, synthetic construct
  misc_feature 1..21: note = Synthetic
  source 1..21: mol_type = other RNA
acggctacgaaaatccaacct

SEQ ID NO: 223 - RNA, 21 nt, synthetic construct
  misc_feature 1..21: note = Synthetic
  source 1..21: mol_type = other RNA
catcaaaaattggtgttcttt

SEQ ID NO: 224 - RNA, 21 nt, synthetic construct
  misc_feature 1..21: note = Synthetic
  source 1..21: mol_type = other RNA
atccaacctacaagttctttg

SEQ ID NO: 225 - RNA, 21 nt, synthetic construct
  misc_feature 1..21: note = Synthetic
  source 1..21: mol_type = other RNA
cgctttctacactgtattaca

SEQ ID NO: 226 - RNA, 21 nt, synthetic construct
  misc_feature 1..21: note = Synthetic
  source 1..21: mol_type = other RNA
tccaacctacaagttctttga

SEQ ID NO: 227 - RNA, 21 nt, synthetic construct
  misc_feature 1..21: note = Synthetic
  source 1..21: mol_type = other RNA
tctctctttacattttggtct

SEQ ID NO: 228 - RNA, 21 nt, synthetic construct
  misc_feature 1..21: note = Synthetic
  source 1..21: mol_type = other RNA
ctctctttacattttggtctt

SEQ ID NO: 229 - RNA, 21 nt, synthetic construct
  misc_feature 1..21: note = Synthetic
  source 1..21: mol_type = other RNA
tttgtgtactgtaaagaattt

SEQ ID NO: 230 - RNA, 21 nt, synthetic construct
  misc_feature 1..21: note = Synthetic
  source 1..21: mol_type = other RNA
gtgtactgtaaagaatttagt

SEQ ID NO: 231 - RNA, 21 nt, synthetic construct
  misc_feature 1..21: note = Synthetic
  source 1..21: mol_type = other RNA
acccaattaagtcctacttta

SEQ ID NO: 232 - RNA, 21 nt, synthetic construct
  misc_feature 1..21: note = Synthetic
  source 1..21: mol_type = other RNA
tcctactttacatatgcttta

SEQ ID NO: 233 - RNA, 21 nt, synthetic construct
  misc_feature 1..21: note = Synthetic
  source 1..21: mol_type = other RNA
cctactttacatatgctttaa

SEQ ID NO: 234 - RNA, 21 nt, synthetic construct
  misc_feature 1..21: note = Synthetic
  source 1..21: mol_type = other RNA
ttctacactgtattacataaa

SEQ ID NO: 235 - RNA, 21 nt, synthetic construct
  misc_feature 1..21: note = Synthetic
  source 1..21: mol_type = other RNA
tctacactgtattacataaat

SEQ ID NO: 236 - RNA, 21 nt, synthetic construct
  misc_feature 1..21: note = Synthetic
  source 1..21: mol_type = other RNA
cttttaagatgtgtcttcaat

SEQ ID NO: 237 - RNA, 21 nt, synthetic construct
  misc_feature 1..21: note = Synthetic
  source 1..21: mol_type = other RNA
atgtgtcttcaatttgtataa

SEQ ID NO: 238 - RNA, 21 nt, synthetic construct
  misc_feature 1..21: note = Synthetic
  source 1..21: mol_type = other RNA
atcaaaaattggtgttctttg

SEQ ID NO: 239 - RNA, 21 nt, synthetic construct
  misc_feature 1..21: note = Synthetic
  source 1..21: mol_type = other RNA
aaatccaacctacaagttctt

SEQ ID NO: 240 - RNA, 21 nt, synthetic construct
  misc_feature 1..21: note = Synthetic
  source 1..21: mol_type = other RNA
gtactgtaaagaatttagctt

SEQ ID NO: 241 - RNA, 21 nt, synthetic construct
  misc_feature 1..21: note = Synthetic
  source 1..21: mol_type = other RNA
ctcctgattatttatcacata

SEQ ID NO: 242 - RNA, 21 nt, synthetic construct
  misc_feature 1..21: note = Synthetic
  source 1..21: mol_type = other RNA
gccagttgtatattattcttt

SEQ ID NO: 243 - RNA, 21 nt, synthetic construct
  misc_feature 1..21: note = Synthetic
  source 1..21: mol_type = other RNA
aattaagtcctactttacata

SEQ ID NO: 244 - RNA, 21 nt, synthetic construct
  misc_feature 1..21: note = Synthetic
  source 1..21: mol_type = other RNA
cttgcctaagtattcctttct

SEQ ID NO: 245 - RNA, 21 nt, synthetic construct
  misc_feature 1..21: note = Synthetic
  source 1..21: mol_type = other RNA
attcctttcctgatcactatt

SEQ ID NO: 246 - RNA, 21 nt, synthetic construct
  misc_feature 1..21: note = Synthetic
  source 1..21: mol_type = other RNA
actatgcattttaaagttaaa

SEQ ID NO: 247 - RNA, 21 nt, synthetic construct
  misc_feature 1..21: note = Synthetic
  source 1..21: mol_type = other RNA
tgttcattgtaagcactttta

SEQ ID NO: 248 - RNA, 21 nt, synthetic construct
  misc_feature 1..21: note = Synthetic
  source 1..21: mol_type = other RNA
aattaccaagaattctccaaa

SEQ ID NO: 249 - RNA, 21 nt, synthetic construct
  misc_feature 1..21: note = Synthetic
  source 1..21: mol_type = other RNA
ttaccaagaattctccaaaat

SEQ ID NO: 250 - RNA, 21 nt, synthetic construct
  misc_feature 1..21: note = Synthetic
  source 1..21: mol_type = other RNA
tcattgcttatgacatgatct

SEQ ID NO: 251 - RNA, 21 nt, synthetic construct
  misc_feature 1..21: note = Synthetic
  source 1..21: mol_type = other RNA
ttttaagatgtgtcttcaatt

SEQ ID NO: 252 - RNA, 21 nt, synthetic construct
  misc_feature 1..21: note = Synthetic
  source 1..21: mol_type = other RNA
atcctgttaaacttcctacaa

SEQ ID NO: 253 - RNA, 21 nt, synthetic construct
  misc_feature 1..21: note = Synthetic
  source 1..21: mol_type = other RNA
actattcagatgacgtcttgt

SEQ ID NO: 254 - RNA, 21 nt, synthetic construct
  misc_feature 1..21: note = Synthetic
  source 1..21: mol_type = other RNA
gttcatcatcaaaaattggtt

SEQ ID NO: 255 - RNA, 21 nt, synthetic construct
  misc_feature 1..21: note = Synthetic
  source 1..21: mol_type = other RNA
tatctctctttacattttggt

SEQ ID NO: 256 - RNA, 21 nt, synthetic construct
  misc_feature 1..21: note = Synthetic
  source 1..21: mol_type = other RNA
atctctctttacattttggtt

SEQ ID NO: 257 - RNA, 21 nt, synthetic construct
  misc_feature 1..21: note = Synthetic
  source 1..21: mol_type = other RNA
tgtgtactgtaaagaatttat

SEQ ID NO: 258 - RNA, 21 nt, synthetic construct
  misc_feature 1..21: note = Synthetic
  source 1..21: mol_type = other RNA
ctactttacatatgctttaat

SEQ ID NO: 259 - RNA, 21 nt, synthetic construct
  misc_feature 1..21: note = Synthetic
  source 1..21: mol_type = other RNA
tgcctaagtattcctttcctt

SEQ ID NO: 260 - RNA, 21 nt, synthetic construct
  misc_feature 1..21: note = Synthetic
  source 1..21: mol_type = other RNA
aagtattcctttcctgatcat

SEQ ID NO: 261 - RNA, 21 nt, synthetic construct
  misc_feature 1..21: note = Synthetic
  source 1..21: mol_type = other RNA
gtattcctttcctgatcacta

SEQ ID NO: 262 - RNA, 21 nt, synthetic construct
  misc_feature 1..21: note = Synthetic
  source 1..21: mol_type = other RNA
ttcctgatcactatgcatttt

SEQ ID NO: 263 - RNA, 21 nt, synthetic construct
  misc_feature 1..21: note = Synthetic
  source 1..21: mol_type = other RNA
ctgatcactatgcattttaaa

SEQ ID NO: 264 - RNA, 21 nt, synthetic construct
  misc_feature 1..21: note = Synthetic
  source 1..21: mol_type = other RNA
cacgtatctttgggtctttga

SEQ ID NO: 265 - RNA, 21 nt, synthetic construct
  misc_feature 1..21: note = Synthetic
  source 1..21: mol_type = other RNA
tgggtctttgataaagaaaat

SEQ ID NO: 266 - RNA, 21 nt, synthetic construct
  misc_feature 1..21: note = Synthetic
  source 1..21: mol_type = other RNA
tcaattaccaagaattctcca

SEQ ID NO: 267 - RNA, 21 nt, synthetic construct
  misc_feature 1..21: note = Synthetic
  source 1..21: mol_type = other RNA
tcgctttctacactgtattat

SEQ ID NO: 268 - RNA, 21 nt, synthetic construct
  misc_feature 1..21: note = Synthetic
  source 1..21: mol_type = other RNA
attttctttaaccagtctgaa

SEQ ID NO: 269 - RNA, 21 nt, synthetic construct
  misc_feature 1..21: note = Synthetic
  source 1..21: mol_type = other RNA
ctttaaccagtctgaagtttc

SEQ ID NO: 270 - RNA, 21 nt, synthetic construct
  misc_feature 1..21: note = Synthetic
  source 1..21: mol_type = other RNA
taagatgtgtcttcaatttgt

SEQ ID NO: 271 - RNA, 21 nt, synthetic construct
  misc_feature 1..21: note = Synthetic
  source 1..21: mol_type = other RNA
gatcctgttaaacttcctaca

SEQ ID NO: 272 - RNA, 21 nt, synthetic construct
  misc_feature 1..21: note = Synthetic
  source 1..21: mol_type = other RNA
ctgcttcagaaagagcaaaat

SEQ ID NO: 273 - RNA, 21 nt, synthetic construct
  misc_feature 1..21: note = Synthetic
  source 1..21: mol_type = other RNA
cagaaagagcaaaactattca

SEQ ID NO: 274 - RNA, 21 nt, synthetic construct
  misc_feature 1..21: note = Synthetic
  source 1..21: mol_type = other RNA
tatgaagttcatcatcaaaaa

SEQ ID NO: 275 - RNA, 21 nt, synthetic construct
  misc_feature 1..21: note = Synthetic
  source 1..21: mol_type = other RNA
catcatcaaaaattggtgttt

SEQ ID NO: 276 - RNA, 21 nt, synthetic construct
  misc_feature 1..21: note = Synthetic
  source 1..21: mol_type = other RNA
tcaaaaattggtgttctttgt

SEQ ID NO: 277 - RNA, 21 nt, synthetic construct
  misc_feature 1..21: note = Synthetic
  source 1..21: mol_type = other RNA
aaaatccaacctacaagttct

SEQ ID NO: 278 - RNA, 21 nt, synthetic construct
  misc_feature 1..21: note = Synthetic
  source 1..21: mol_type = other RNA
ccaacctacaagttctttgat

SEQ ID NO: 279 - RNA, 21 nt, synthetic construct
  misc_feature 1..21: note = Synthetic
  source 1..21: mol_type = other RNA
actcattatcgccttttgaca

SEQ ID NO: 280 - RNA, 21 nt, synthetic construct
  misc_feature 1..21: note = Synthetic
  source 1..21: mol_type = other RNA
ctcattatcgccttttgacat

SEQ ID NO: 281 - RNA, 21 nt, synthetic construct
  misc_feature 1..21: note = Synthetic
  source 1..21: mol_type = other RNA
tgtgctgtaacacaagtagat

SEQ ID NO: 282 - RNA, 21 nt, synthetic construct
  misc_feature 1..21: note = Synthetic
  source 1..21: mol_type = other RNA
gtgctgtaacacaagtagatt

SEQ ID NO: 283 - RNA, 21 nt, synthetic construct
  misc_feature 1..21: note = Synthetic
  source 1..21: mol_type = other RNA
tctttacattttggtctctat

SEQ ID NO: 284 - RNA, 21 nt, synthetic construct
  misc_feature 1..21: note = Synthetic
  source 1..21: mol_type = other RNA
atgggttttgtgtactgtaaa

SEQ ID NO: 285 - RNA, 21 nt, synthetic construct
  misc_feature 1..21: note = Synthetic
  source 1..21: mol_type = other RNA
ttgtgtactgtaaagaattta

SEQ ID NO: 286 - RNA, 21 nt, synthetic construct
  misc_feature 1..21: note = Synthetic
  source 1..21: mol_type = other RNA
gctgtatcaaactagtgcatt

SEQ ID NO: 287 - RNA, 21 nt, synthetic construct
  misc_feature 1..21: note = Synthetic
  source 1..21: mol_type = other RNA
ctagtgcatgaatagattctt

SEQ ID NO: 288 - RNA, 21 nt, synthetic construct
  misc_feature 1..21: note = Synthetic
  source 1..21: mol_type = other RNA
tagtgcatgaatagattctct

SEQ ID NO: 289 - RNA, 21 nt, synthetic construct
  misc_feature 1..21: note = Synthetic
  source 1..21: mol_type = other RNA
ctctcctgattatttatcaca

SEQ ID NO: 290 - RNA, 21 nt, synthetic construct
  misc_feature 1..21: note = Synthetic
  source 1..21: mol_type = other RNA
cctgattatttatcacatagt

SEQ ID NO: 291 - RNA, 21 nt, synthetic construct
  misc_feature 1..21: note = Synthetic
  source 1..21: mol_type = other RNA
taagtcctactttacatatgt

SEQ ID NO: 292 - RNA, 21 nt, synthetic construct
  misc_feature 1..21: note = Synthetic
  source 1..21: mol_type = other RNA
agtcctactttacatatgctt

SEQ ID NO: 293 - RNA, 21 nt, synthetic construct
  misc_feature 1..21: note = Synthetic
  source 1..21: mol_type = other RNA
gtcctactttacatatgcttt

SEQ ID NO: 294 - RNA, 21 nt, synthetic construct
  misc_feature 1..21: note = Synthetic
  source 1..21: mol_type = other RNA
ttctcttgcctaagtattcct

SEQ ID NO: 295 - RNA, 21 nt, synthetic construct
  misc_feature 1..21: note = Synthetic
  source 1..21: mol_type = other RNA
ctcttgcctaagtattccttt

SEQ ID NO: 296 - RNA, 21 nt, synthetic construct
  misc_feature 1..21: note = Synthetic
  source 1..21: mol_type = other RNA
tattcctttcctgatcactat

SEQ ID NO: 297 - RNA, 21 nt, synthetic construct
  misc_feature 1..21: note = Synthetic
  source 1..21: mol_type = other RNA
tttcctgatcactatgcattt

SEQ ID NO: 298 - RNA, 21 nt, synthetic construct
  misc_feature 1..21: note = Synthetic
  source 1..21: mol_type = other RNA
cactatgcattttaaagttaa

SEQ ID NO: 299 - RNA, 21 nt, synthetic construct
  misc_feature 1..21: note = Synthetic
  source 1..21: mol_type = other RNA
ctgcattttactgtacagatt

SEQ ID NO: 300 - RNA, 21 nt, synthetic construct
  misc_feature 1..21: note = Synthetic
  source 1..21: mol_type = other RNA
ttctgctatatttgtgatata

SEQ ID NO: 301 - RNA, 21 nt, synthetic construct
  misc_feature 1..21: note = Synthetic
  source 1..21: mol_type = other RNA
tctgctatatttgtgatatat

SEQ ID NO: 302 - RNA, 21 nt, synthetic construct
  misc_feature 1..21: note = Synthetic
  source 1..21: mol_type = other RNA
acgtatctttgggtctttgat

SEQ ID NO: 303 - RNA, 21 nt, synthetic construct
  misc_feature 1..21: note = Synthetic
  source 1..21: mol_type = other RNA
tctttgggtctttgataaaga

SEQ ID NO: 304 - RNA, 21 nt, synthetic construct
  misc_feature 1..21: note = Synthetic
  source 1..21: mol_type = other RNA
ctttgggtctttgataaagaa

SEQ ID NO: 305 - RNA, 21 nt, synthetic construct
  misc_feature 1..21: note = Synthetic
  source 1..21: mol_type = other RNA
ttgggtctttgataaagaaaa

SEQ ID NO: 306 - RNA, 21 nt, synthetic construct
  misc_feature 1..21: note = Synthetic
  source 1..21: mol_type = other RNA
agaatccctgttcattgtaat

SEQ ID NO: 307 - RNA, 21 nt, synthetic construct
  misc_feature 1..21: note = Synthetic
  source 1..21: mol_type = other RNA
gaatccctgttcattgtaagt

SEQ ID NO: 308 - RNA, 21 nt, synthetic construct
  misc_feature 1..21: note = Synthetic
  source 1..21: mol_type = other RNA
gttcattgtaagcacttttat

SEQ ID NO: 309 - RNA, 21 nt, synthetic construct
  misc_feature 1..21: note = Synthetic
  source 1..21: mol_type = other RNA
ttatgacatgatcgctttcta

SEQ ID NO: 310 - RNA, 21 nt, synthetic construct
  misc_feature 1..21: note = Synthetic
  source 1..21: mol_type = other RNA
atgacatgatcgctttctaca

SEQ ID NO: 311 - RNA, 21 nt, synthetic construct
  misc_feature 1..21: note = Synthetic
  source 1..21: mol_type = other RNA
catgatcgctttctacactgt

SEQ ID NO: 312 - RNA, 21 nt, synthetic construct
  misc_feature 1..21: note = Synthetic
  source 1..21: mol_type = other RNA
ctttctacactgtattacata

SEQ ID NO: 313 - RNA, 21 nt, synthetic construct
  misc_feature 1..21: note = Synthetic
  source 1..21: mol_type = other RNA
gattcaattttctttaaccat

SEQ ID NO: 314 - RNA, 21 nt, synthetic construct
  misc_feature 1..21: note = Synthetic
  source 1..21: mol_type = other RNA
tttctttaaccagtctgaagt

SEQ ID NO: 315 - RNA, 21 nt, synthetic construct
  misc_feature 1..21: note = Synthetic
  source 1..21: mol_type = other RNA
tttaagatgtgtcttcaattt

SEQ ID NO: 316 - RNA, 21 nt, synthetic construct
  misc_feature 1..21: note = Synthetic
  source 1..21: mol_type = other RNA
ttaagatgtgtcttcaatttg

SEQ ID NO: 317 - RNA, 21 nt, synthetic construct
  misc_feature 1..21: note = Synthetic
  source 1..21: mol_type = other RNA
agatgtgtcttcaatttgtat

SEQ ID NO: 318 - RNA, 21 nt, synthetic construct
  misc_feature 1..21: note = Synthetic
  source 1..21: mol_type = other RNA
tgtcttcaatttgtataaaat

SEQ ID NO: 319 - RNA, 21 nt, synthetic construct
  misc_feature 1..21: note = Synthetic
  source 1..21: mol_type = other RNA
cttcaatttgtataaaatggt

SEQ ID NO: 320 - RNA, 21 nt, synthetic construct
  misc_feature 1..21: note = Synthetic
  source 1..21: mol_type = other RNA
atggtgttttcatgtaaataa

SEQ ID NO: 321 - RNA, 21 nt, synthetic construct
  misc_feature 1..21: note = Synthetic
  source 1..21: mol_type = other RNA
ttcttttaagatgtgtcttca

SEQ ID NO: 322 - RNA, 21 nt, synthetic construct
  misc_feature 1..21: note = Synthetic
  source 1..21: mol_type = other RNA
tgtattctatctctctttaca

SEQ ID NO: 323 - RNA, 21 nt, synthetic construct
  misc_feature 1..21: note = Synthetic
  source 1..21: mol_type = other RNA
gtctctatactacattattaa

SEQ ID NO: 324 - RNA, 21 nt, synthetic construct
  misc_feature 1..21: note = Synthetic
  source 1..21: mol_type = other RNA
tctctatactacattattaat

SEQ ID NO: 325 - RNA, 21 nt, synthetic construct
  misc_feature 1..21: note = Synthetic
  source 1..21: mol_type = other RNA
ctctatactacattattaatt

SEQ ID NO: 326 - RNA, 21 nt, synthetic construct
  misc_feature 1..21: note = Synthetic
  source 1..21: mol_type = other RNA
cttcaattaccaagaattctt

SEQ ID NO: 327 - RNA, 21 nt, synthetic construct
  misc_feature 1..21: note = Synthetic
  source 1..21: mol_type = other RNA
ccacacatcagtaatgtattt

SEQ ID NO: 328 - RNA, 21 nt, synthetic construct
  misc_feature 1..21: note = Synthetic
  source 1..21: mol_type = other RNA
ctatctctctttacattttgt

SEQ ID NO: 329 - RNA, 21 nt, synthetic construct
  misc_feature 1..21: note = Synthetic
  source 1..21: mol_type = other RNA
ggtctctatactacattatta

SEQ ID NO: 330 - RNA, 21 nt, synthetic construct
  misc_feature 1..21: note = Synthetic
  source 1..21: mol_type = other RNA
tctatactacattattaatgt

SEQ ID NO: 331 - RNA, 21 nt, synthetic construct
  misc_feature 1..21: note = Synthetic
  source 1..21: mol_type = other RNA
ggtcttcaattaccaagaatt

SEQ ID NO: 332 - RNA, 21 nt, synthetic construct
  misc_feature 1..21: note = Synthetic
  source 1..21: mol_type = other RNA
caggatatgaagttcatcatt

SEQ ID NO: 333 - RNA, 21 nt, synthetic construct
  misc_feature 1..21: note = Synthetic
  source 1..21: mol_type = other RNA
acacatcagtaatgtattcta

SEQ ID NO: 334 - RNA, 21 nt, synthetic construct
  misc_feature 1..21: note = Synthetic
  source 1..21: mol_type = other RNA
ctatactacattattaatggt

SEQ ID NO: 335 - RNA, 21 nt, synthetic construct
  misc_feature 1..21: note = Synthetic
  source 1..21: mol_type = other RNA
cccgttttatgatttactcat

SEQ ID NO: 336 - RNA, 21 nt, synthetic construct
  misc_feature 1..21: note = Synthetic
  source 1..21: mol_type = other RNA
ttccatgactgcattttactt

SEQ ID NO: 337 - RNA, 21 nt, synthetic construct
  misc_feature 1..21: note = Synthetic
  source 1..21: mol_type = other RNA
tcttcaattaccaagaattct

SEQ ID NO: 338 - RNA, 21 nt, synthetic construct
  misc_feature 1..21: note = Synthetic
  source 1..21: mol_type = other RNA
ctgaagtttcatttatgatat

SEQ ID NO: 339 - RNA, 23 nt, synthetic construct
  misc_feature 1..23: note = Synthetic
  source 1..23: mol_type = other RNA
aaagtaggacttaattgggtcac

SEQ ID NO: 340 - DNA, 23 bp, synthetic construct
  misc_feature 1..23: note = Synthetic
  source 1..23: mol_type = other DNA
atgtgataaataatcaggagaga

SEQ ID NO: 341 - DNA, 23 bp, synthetic construct
  misc_feature 1..23: note = Synthetic
  source 1..23: mol_type = other DNA
atggattaattcaagttcaggca

SEQ ID NO: 342 - RNA, 23 nt, synthetic construct
  misc_feature 1..23: note = Synthetic
  source 1..23: mol_type = other RNA
aattgcacctttgtttgaaccca

SEQ ID NO: 343 - RNA, 23 nt, synthetic construct
  misc_feature 1..23: note = Synthetic
  source 1..23: mol_type = other RNA
caaaaggcgataatgagtaaatc

SEQ ID NO: 344 - DNA, 23 bp, synthetic construct
  misc_feature 1..23: note = Synthetic
  source 1..23: mol_type = other DNA
actagtttgatacagctaaattc

SEQ ID NO: 345 - RNA, 23 nt, synthetic construct
  misc_feature 1..23: note = Synthetic
  source 1..23: mol_type = other RNA
agtgatcaggaaaggaatactta

SEQ ID NO: 346 - RNA, 23 nt, synthetic construct
  misc_feature 1..23: note = Synthetic
  source 1..23: mol_type = other RNA
gaaagcgatcatgtcataagcaa

SEQ ID NO: 347 - DNA, 23 bp, synthetic construct
  misc_feature 1..23: note = Synthetic
  source 1..23: mol_type = other DNA
tacaaattgaagacacatcttaa

SEQ ID NO: 348 - RNA, 23 nt, synthetic construct
  misc_feature 1..23: note = Synthetic
  source 1..23: mol_type = other RNA
atagtgaagcaatggttttgctg

SEQ ID NO: 349 - RNA, 23 nt, synthetic construct
  misc_feature 1..23: note = Synthetic
  source 1..23: mol_type = other RNA
aaaaggcgataatgagtaaatca

SEQ ID NO: 350 - RNA, 23 nt, synthetic construct
  misc_feature 1..23: note = Synthetic
  source 1..23: mol_type = other RNA
atcaaaaggcgataatgagtaaa

SEQ ID NO: 351 - RNA, 23 nt, synthetic construct
  misc_feature 1..23: note = Synthetic
  source 1..23: mol_type = other RNA
agattaattcaagttcaggcatc

SEQ ID NO: 352 - DNA, 23 bp, synthetic construct
  misc_feature 1..23: note = Synthetic
  source 1..23: mol_type = other DNA
tgtggattaattcaagttcaggc

SEQ ID NO: 353 - DNA, 23 bp, synthetic construct
  misc_feature 1..23: note = Synthetic
  source 1..23: mol_type = other DNA
aactagtttgatacagctaaatt

SEQ ID NO: 354 - RNA, 23 nt, synthetic construct
  misc_feature 1..23: note = Synthetic
  source 1..23: mol_type = other RNA
taatcaggagagaatctattcat

SEQ ID NO: 355 - RNA, 23 nt, synthetic construct
  misc_feature 1..23: note = Synthetic
  source 1..23: mol_type = other RNA
atatgtgataaataatcaggaga

SEQ ID NO: 356 - DNA, 23 bp, synthetic construct
  misc_feature 1..23: note = Synthetic
  source 1..23: mol_type = other DNA
ataaagtaggacttaattgggtc

SEQ ID NO: 357 - DNA, 23 bp, synthetic construct
  misc_feature 1..23: note = Synthetic
  source 1..23: mol_type = other DNA
aatcgattcttaaagcatatgta

SEQ ID NO: 358 - RNA, 23 nt, synthetic construct
  misc_feature 1..23: note = Synthetic
  source 1..23: mol_type = other RNA
agaatacttaggcaagagaagca

SEQ ID NO: 359 - RNA, 23 nt, synthetic construct
  misc_feature 1..23: note = Synthetic
  source 1..23: mol_type = other RNA
acgatcatgtcataagcaatgat

SEQ ID NO: 360 - RNA, 23 nt, synthetic construct
  misc_feature 1..23: note = Synthetic
  source 1..23: mol_type = other RNA
agaaagcgatcatgtcataagca

SEQ ID NO: 361 - RNA, 23 nt, synthetic construct
  misc_feature 1..23: note = Synthetic
  source 1..23: mol_type = other RNA
atagaaagcgatcatgtcataag

SEQ ID NO: 362 - RNA, 23 nt, synthetic construct
  misc_feature 1..23: note = Synthetic
  source 1..23: mol_type = other RNA
atgtagaaagcgatcatgtcata

SEQ ID NO: 363 - RNA, 23 nt, synthetic construct
  misc_feature 1..23: note = Synthetic
  source 1..23: mol_type = other RNA
aatacagtgtagaaagcgatcat

SEQ ID NO: 364 - RNA, 23 nt, synthetic construct
  misc_feature 1..23: note = Synthetic
  source 1..23: mol_type = other RNA
agacgtcatctgaatagttttgc

SEQ ID NO: 365 - DNA, 23 bp, synthetic construct
  misc_feature 1..23: note = Synthetic
  source 1..23: mol_type = other DNA
aagacgtcatctgaatagttttg

SEQ ID NO: 366 - RNA, 23 nt, synthetic construct
  misc_feature 1..23: note = Synthetic
  source 1..23: mol_type = other RNA
acttgtaggttggattttcgtag

SEQ ID NO: 367 - DNA, 23 bp, synthetic construct
  misc_feature 1..23: note = Synthetic
  source 1..23: mol_type = other DNA
aatacttaggcaagagaagcagc

SEQ ID NO: 368 - RNA, 23 nt, synthetic construct
  misc_feature 1..23: note = Synthetic
  source 1..23: mol_type = other RNA
aaagcgatcatgtcataagcaat

SEQ ID NO: 369 - DNA, 23 bp, synthetic construct
  misc_feature 1..23: note = Synthetic
  source 1..23: mol_type = other DNA
atacagtgtagaaagcgatcatg

SEQ ID NO: 370 - RNA, 23 nt, synthetic construct
  misc_feature 1..23: note = Synthetic
  source 1..23: mol_type = other RNA
taatacagtgtagaaagcgatca

SEQ ID NO: 371 - RNA, 23 nt, synthetic construct
  misc_feature 1..23: note = Synthetic
  source 1..23: mol_type = other RNA
agttttcgtttcggtcaaagatg

SEQ ID NO: 372 - DNA, 23 bp, synthetic construct
  misc_feature 1..23: note = Synthetic
  source 1..23: mol_type = other DNA
tgatatttgtcaacccagaacct

SEQ ID NO: 373 - RNA, 23 nt, synthetic construct
  misc_feature 1..23: note = Synthetic
  source 1..23: mol_type = other RNA
atcttgatatttgtcaacccaga

SEQ ID NO: 374 - RNA, 23 nt, synthetic construct
  misc_feature 1..23: note = Synthetic
  source 1..23: mol_type = other RNA
aaaggcgataatgagtaaatcat

SEQ ID NO: 375 - RNA, 23 nt, synthetic construct
  misc_feature 1..23: note = Synthetic
  source 1..23: mol_type = other RNA
tgcatagtgatcaggaaaggaat

SEQ ID NO: 376 - DNA, 23 bp, synthetic construct
  misc_feature 1..23: note = Synthetic
  source 1..23: mol_type = other DNA
aatgcatagtgatcaggaaagga

SEQ ID NO: 377 - RNA, 23 nt, synthetic construct
  misc_feature 1..23: note = Synthetic
  source 1..23: mol_type = other RNA
agcgatcatgtcataagcaatga

SEQ ID NO: 378 - RNA, 23 nt, synthetic construct
  misc_feature 1..23: note = Synthetic
  source 1..23: mol_type = other RNA
aaacttcagactggttaaagaaa

SEQ ID NO: 379 - DNA, 23 bp, synthetic construct
  misc_feature 1..23: note = Synthetic
  source 1..23: mol_type = other DNA
aatcgtttccgtaactgatcctt

SEQ ID NO: 380 - DNA, 23 bp, synthetic construct
  misc_feature 1..23: note = Synthetic
  source 1..23: mol_type = other DNA
tcttgatatttgtcaacccagaa

SEQ ID NO: 381 - DNA, 23 bp, synthetic construct
  misc_feature 1..23: note = Synthetic
  source 1..23: mol_type = other DNA
aggcgataatgagtaaatcataa

SEQ ID NO: 382 - RNA, 23 nt, synthetic construct
  misc_feature 1..23: note = Synthetic
  source 1..23: mol_type = other RNA
aattgggtcacaaaccacaagaa

SEQ ID NO: 383 - RNA, 23 nt, synthetic construct
  misc_feature 1..23: note = Synthetic
  source 1..23: mol_type = other RNA
acatcgattcttaaagcatatgt

SEQ ID NO: 384 - RNA, 23 nt, synthetic construct
  misc_feature 1..23: note = Synthetic
  source 1..23: mol_type = other RNA
acccaaagatacgtggacaaaaa

SEQ ID NO: 385 - RNA, 23 nt, synthetic construct
  misc_feature 1..23: note = Synthetic
  source 1..23: mol_type = other RNA
acgtaaaagtgcttacaatgaac

SEQ ID NO: 386 - RNA, 23 nt, synthetic construct
  misc_feature 1..23: note = Synthetic
  source 1..23: mol_type = other RNA
agttcactaatcatgttggccaa

SEQ ID NO: 387 - DNA, 23 bp, synthetic construct
  misc_feature 1..23: note = Synthetic
  source 1..23: mol_type = other DNA
acatcgtttccgtaactgatcct

SEQ ID NO: 388 - RNA, 23 nt, synthetic construct
  misc_feature 1..23: note = Synthetic
  source 1..23: mol_type = other RNA
aatgagagcatcgtttccgtaac

SEQ ID NO: 389 - RNA, 23 nt, synthetic construct
  misc_feature 1..23: note = Synthetic
  source 1..23: mol_type = other RNA
aaggcgataatgagtaaatcata

SEQ ID NO: 390 - RNA, 23 nt, synthetic construct
  misc_feature 1..23: note = Synthetic
  source 1..23: mol_type = other RNA
aattcaagttcaggcatctactt

SEQ ID NO: 391 - RNA, 23 nt, synthetic construct
  misc_feature 1..23: note = Synthetic
  source 1..23: mol_type = other RNA
aaccacaagaataatatacaact

SEQ ID NO: 392 - RNA, 23 nt, synthetic construct
  misc_feature 1..23: note = Synthetic
  source 1..23: mol_type = other RNA
aaatatagcagaagcagcaatct

SEQ ID NO: 393 - RNA, 23 nt, synthetic construct
  misc_feature 1..23: note = Synthetic
  source 1..23: mol_type = other RNA
tcctatatcacaaatatagcaga

SEQ ID NO: 394 - RNA, 23 nt, synthetic construct
  misc_feature 1..23: note = Synthetic
  source 1..23: mol_type = other RNA
aagtctcaatgcctaatgtgtgc

SEQ ID NO: 395 - DNA, 23 bp, synthetic construct
  misc_feature 1..23: note = Synthetic
  source 1..23: mol_type = other DNA
ttacaatgaacagggattctttt

SEQ ID NO: 396 - RNA, 23 nt, synthetic construct
  misc_feature 1..23: note = Synthetic
  source 1..23: mol_type = other RNA
accgtaaaagtgcttacaatgaa

SEQ ID NO: 397 - DNA, 23 bp, synthetic construct
  misc_feature 1..23: note = Synthetic
  source 1..23: mol_type = other DNA
aagcgatcatgtcataagcaatg

SEQ ID NO: 398 - RNA, 23 nt, synthetic construct
  misc_feature 1..23: note = Synthetic
  source 1..23: mol_type = other RNA
agtttccgtaactgatccttggt

SEQ ID NO: 399 - RNA, 23 nt, synthetic construct
  misc_feature 1..23: note = Synthetic
  source 1..23: mol_type = other RNA
atatttgtcaacccagaacctgg

SEQ ID NO: 400 - DNA, 23 bp, synthetic construct
  misc_feature 1..23: note = Synthetic
  source 1..23: mol_type = other DNA
atttgtttgaacccacatcttct

SEQ ID NO: 401 - RNA, 23 nt, synthetic construct
  misc_feature 1..23: note = Synthetic
  source 1..23: mol_type = other RNA
tgtgtactgtttcttcttcagca

SEQ ID NO: 402 - DNA, 23 bp, synthetic construct
  misc_feature 1..23: note = Synthetic
  source 1..23: mol_type = other DNA
aatggttttgctgtccaacttca

SEQ ID NO: 403 - DNA, 23 bp, synthetic construct
  misc_feature 1..23: note = Synthetic
  source 1..23: mol_type = other DNA
attctataaatggacaccgatgg

SEQ ID NO: 404 - RNA, 23 nt, synthetic construct
  misc_feature 1..23: note = Synthetic
  source 1..23: mol_type = other RNA
tattctataaatggacaccgatg

SEQ ID NO: 405 - DNA, 23 bp, synthetic construct
  misc_feature 1..23: note = Synthetic
  source 1..23: mol_type = other DNA
agcatctacttgtgttacagcac

SEQ ID NO: 406 - DNA, 23 bp, synthetic construct
  misc_feature 1..23: note = Synthetic
  source 1..23: mol_type = other DNA
ttcaagttcaggcatctacttgt

SEQ ID NO: 407 - RNA, 23 nt, synthetic construct
  misc_feature 1..23: note = Synthetic
  source 1..23: mol_type = other RNA
taattgggtcacaaaccacaaga

SEQ ID NO: 408 - RNA, 23 nt, synthetic construct
  misc_feature 1..23: note = Synthetic
  source 1..23: mol_type = other RNA
agacttaattgggtcacaaacca

SEQ ID NO: 409 - RNA, 23 nt, synthetic construct
  misc_feature 1..23: note = Synthetic
  source 1..23: mol_type = other RNA
agtaggacttaattgggtcacaa

SEQ ID NO: 410 - RNA, 23 nt, synthetic construct
  misc_feature 1..23: note = Synthetic
  source 1..23: mol_type = other RNA
accatcgattcttaaagcatatg

SEQ ID NO: 411 - DNA, 23 bp, synthetic construct
  misc_feature 1..23: note = Synthetic
  source 1..23: mol_type = other DNA
tcttaattcctatatcacaaata

SEQ ID NO: 412 - RNA, 23 nt, synthetic construct
  misc_feature 1..23: note = Synthetic
  source 1..23: mol_type = other RNA
tacaatgaacagggattcttttc

SEQ ID NO: 413 - RNA, 23 nt, synthetic construct
  misc_feature 1..23: note = Synthetic
  source 1..23: mol_type = other RNA
agcaatgattctgtacaatcatc

SEQ ID NO: 414 - RNA, 23 nt, synthetic construct
  misc_feature 1..23: note = Synthetic
  source 1..23: mol_type = other RNA
aaagaagggtttgtccaggcatg

SEQ ID NO: 415 - DNA, 23 bp, synthetic construct
  misc_feature 1..23: note = Synthetic
  source 1..23: mol_type = other DNA
atcatctgaatagttttgctctt

SEQ ID NO: 416 - RNA, 23 nt, synthetic construct
  misc_feature 1..23: note = Synthetic
  source 1..23: mol_type = other RNA
ataactgatccttggttcactaa

SEQ ID NO: 417 - RNA, 23 nt, synthetic construct
  misc_feature 1..23: note = Synthetic
  source 1..23: mol_type = other RNA
acgtaactgatccttggttcact

SEQ ID NO: 418 - DNA, 23 bp, synthetic construct
  misc_feature 1..23: note = Synthetic
  source 1..23: mol_type = other DNA
agagcatcgtttccgtaactgat

SEQ ID NO: 419 - RNA, 23 nt, synthetic construct
  misc_feature 1..23: note = Synthetic
  source 1..23: mol_type = other RNA
ttgtttgaacccacatcttctgc

SEQ ID NO: 420 - RNA, 23 nt, synthetic construct
  misc_feature 1..23: note = Synthetic
  source 1..23: mol_type = other RNA
tttgctgtccaacttcagaggct

SEQ ID NO: 421 - RNA, 23 nt, synthetic construct
  misc_feature 1..23: note = Synthetic
  source 1..23: mol_type = other RNA
acgataatgagtaaatcataaaa

SEQ ID NO: 422 - DNA, 23 bp, synthetic construct
  misc_feature 1..23: note = Synthetic
  source 1..23: mol_type = other DNA
attgtgttacagcacagctgtca

SEQ ID NO: 423 - RNA, 23 nt, synthetic construct
  misc_feature 1..23: note = Synthetic
  source 1..23: mol_type = other RNA
ataggacttaattgggtcacaaa

SEQ ID NO: 424 - RNA, 23 nt, synthetic construct
  misc_feature 1..23: note = Synthetic
  source 1..23: mol_type = other RNA
tcgattcttaaagcatatgtaaa

SEQ ID NO: 425 - RNA, 23 nt, synthetic construct
  misc_feature 1..23: note = Synthetic
  source 1..23: mol_type = other RNA
tccaagaatgtatttatttacat

SEQ ID NO: 426 - RNA, 23 nt, synthetic construct
  misc_feature 1..23: note = Synthetic
  source 1..23: mol_type = other RNA
aagcatcgtttccgtaactgatc

SEQ ID NO: 427 - DNA, 23 bp, synthetic construct
  misc_feature 1..23: note = Synthetic
  source 1..23: mol_type = other DNA
aaactctccattcacgggaagga

SEQ ID NO: 428 - DNA, 23 bp, synthetic construct
  misc_feature 1..23: note = Synthetic
  source 1..23: mol_type = other DNA
aaatggttttgctgtccaacttc

SEQ ID NO: 429 - RNA, 23 nt, synthetic construct
  misc_feature 1..23: note = Synthetic
  source 1..23: mol_type = other RNA
atataaatggacaccgatgggta

SEQ ID NO: 430 - DNA, 23 bp, synthetic construct
  misc_feature 1..23: note = Synthetic
  source 1..23: mol_type = other DNA
tctcaatgcctaatgtgtgcaca

SEQ ID NO: 431 - RNA, 23 nt, synthetic construct
  misc_feature 1..23: note = Synthetic
  source 1..23: mol_type = other RNA
ttggttcactaatcatgttggcc

SEQ ID NO: 432 - DNA, 23 bp, synthetic construct
  misc_feature 1..23: note = Synthetic
  source 1..23: mol_type = other DNA
aatccttggttcactaatcatgt

SEQ ID NO: 433 - DNA, 23 bp, synthetic construct
  misc_feature 1..23: note = Synthetic
  source 1..23: mol_type = other DNA
aactgatccttggttcactaatc

SEQ ID NO: 434 - RNA, 23 nt, synthetic construct
  misc_feature 1..23: note = Synthetic
  source 1..23: mol_type = other RNA
ttccgtaactgatccttggttca

SEQ ID NO: 435 - RNA, 23 nt, synthetic construct
  misc_feature 1..23: note = Synthetic
  source 1..23: mol_type = other RNA
tgagagcatcgtttccgtaactg

SEQ ID NO: 436 - DNA, 23 bp, synthetic construct
  misc_feature 1..23: note = Synthetic
  source 1..23: mol_type = other DNA
atcatgtcggaattctgcatcca

SEQ ID NO: 437 - RNA, 23 nt, synthetic construct
  misc_feature 1..23: note = Synthetic
  source 1..23: mol_type = other RNA
agcaatggttttgctgtccaact

SEQ ID NO: 438 - RNA, 23 nt, synthetic construct
  misc_feature 1..23: note = Synthetic
  source 1..23: mol_type = other RNA
tgggtagtgaagcaatggttttg

SEQ ID NO: 439 - RNA, 23 nt, synthetic construct
  misc_feature 1..23: note = Synthetic
  source 1..23: mol_type = other RNA
tctataaatggacaccgatgggt

SEQ ID NO: 440 - RNA, 23 nt, synthetic construct
  misc_feature 1..23: note = Synthetic
  source 1..23: mol_type = other RNA
acagctgtcaaaaggcgataatg

SEQ ID NO: 441 - RNA, 23 nt, synthetic construct
  misc_feature 1..23: note = Synthetic
  source 1..23: mol_type = other RNA
acacagctgtcaaaaggcgataa

SEQ ID NO: 442 - RNA, 23 nt, synthetic construct
  misc_feature 1..23: note = Synthetic
  source 1..23: mol_type = other RNA
agttcaggcatctacttgtgtta

SEQ ID NO: 443 - RNA, 23 nt, synthetic construct
  misc_feature 1..23: note = Synthetic
  source 1..23: mol_type = other RNA
ttaattgggtcacaaaccacaag

SEQ ID NO: 444 - RNA, 23 nt, synthetic construct
  misc_feature 1..23: note = Synthetic
  source 1..23: mol_type = other RNA
aacgttcacatgaagcatccccc

SEQ ID NO: 445 - RNA, 23 nt, synthetic construct
  misc_feature 1..23: note = Synthetic
  source 1..23: mol_type = other RNA
tcaatgcctaatgtgtgcacata

SEQ ID NO: 446 - DNA, 23 bp, synthetic construct
  misc_feature 1..23: note = Synthetic
  source 1..23: mol_type = other DNA
attatattgccacttccattttc

SEQ ID NO: 447 - DNA, 23 bp, synthetic construct
  misc_feature 1..23: note = Synthetic
  source 1..23: mol_type = other DNA
accttatattgccacttccattt

SEQ ID NO: 448 - RNA, 23 nt, synthetic construct
  misc_feature 1..23: note = Synthetic
  source 1..23: mol_type = other RNA
agtttaacaggatctcgggcaag

SEQ ID NO: 449 - RNA, 23 nt, synthetic construct
  misc_feature 1..23: note = Synthetic
  source 1..23: mol_type = other RNA
actgatccttggttcactaatca

SEQ ID NO: 450 - RNA, 23 nt, synthetic construct
  misc_feature 1..23: note = Synthetic
  source 1..23: mol_type = other RNA
tccgtaactgatccttggttcac

SEQ ID NO: 451 - RNA, 23 nt, synthetic construct
  misc_feature 1..23: note = Synthetic
  source 1..23: mol_type = other RNA
tcgtttccgtaactgatccttgg

SEQ ID NO: 452 - DNA, 23 bp, synthetic construct
  misc_feature 1..23: note = Synthetic
  source 1..23: mol_type = other DNA
tcaacttcgttttctgtgttggc

SEQ ID NO: 453 - RNA, 23 nt, synthetic construct
  misc_feature 1..23: note = Synthetic
  source 1..23: mol_type = other RNA
ttgcacctttgtttgaacccaca

SEQ ID NO: 454 - DNA, 23 bp, synthetic construct
  misc_feature 1..23: note = Synthetic
  source 1..23: mol_type = other DNA
acaaggtgatgacgatcactgtc

SEQ ID NO: 455 - DNA, 23 bp, synthetic construct
  misc_feature 1..23: note = Synthetic
  source 1..23: mol_type = other DNA
tataaatggacaccgatgggtag

SEQ ID NO: 456 - DNA, 23 bp, synthetic construct
  misc_feature 1..23: note = Synthetic
  source 1..23: mol_type = other DNA
attgggtcacaaaccacaagaat

SEQ ID NO: 457 - DNA, 23 bp, synthetic construct
  misc_feature 1..23: note = Synthetic
  source 1..23: mol_type = other DNA
aggacttaattgggtcacaaacc

SEQ ID NO: 458 - DNA, 23 bp, synthetic construct
  misc_feature 1..23: note = Synthetic
  source 1..23: mol_type = other DNA
taggacttaattgggtcacaaac

SEQ ID NO: 459 - RNA, 23 nt, synthetic construct
  misc_feature 1..23: note = Synthetic
  source 1..23: mol_type = other RNA
ttggccaagacgtcatctgaata

SEQ ID NO: 460 - RNA, 23 nt, synthetic construct
  misc_feature 1..23: note = Synthetic
  source 1..23: mol_type = other RNA
agcatcgtttccgtaactgatcc

SEQ ID NO: 461 - RNA, 23 nt, synthetic construct
  misc_feature 1..23: note = Synthetic
  source 1..23: mol_type = other RNA
aatgtcggaattctgcatccatc

SEQ ID NO: 462 - DNA, 23 bp, synthetic construct
  misc_feature 1..23: note = Synthetic
  source 1..23: mol_type = other DNA
acgttctgctgcatcttggacag

SEQ ID NO: 463 - RNA, 23 nt, synthetic construct
  misc_feature 1..23: note = Synthetic
  source 1..23: mol_type = other RNA
ataaatggacaccgatgggtagt

SEQ ID NO: 464 - RNA, 23 nt, synthetic construct
  misc_feature 1..23: note = Synthetic
  source 1..23: mol_type = other RNA
attacagcacagctgtcaaaagg

SEQ ID NO: 465 - RNA, 23 nt, synthetic construct
  misc_feature 1..23: note = Synthetic
  source 1..23: mol_type = other RNA
atgttacagcacagctgtcaaaa

SEQ ID NO: 466 - DNA, 23 bp, synthetic construct
  misc_feature 1..23: note = Synthetic
  source 1..23: mol_type = other DNA
tacttgtgttacagcacagctgt

SEQ ID NO: 467 - RNA, 23 nt, synthetic construct
  misc_feature 1..23: note = Synthetic
  source 1..23: mol_type = other RNA
actaatgtgtgcacataaaacag

SEQ ID NO: 468 - DNA, 23 bp, synthetic construct
  misc_feature 1..23: note = Synthetic
  source 1..23: mol_type = other DNA
agagaattcttggtaattgaaga

SEQ ID NO: 469 - RNA, 23 nt, synthetic construct
  misc_feature 1..23: note = Synthetic
  source 1..23: mol_type = other RNA
agaatacattactgatgtgtgga

SEQ ID NO: 470 - RNA, 23 nt, synthetic construct
  misc_feature 1..23: note = Synthetic
  source 1..23: mol_type = other RNA
aataatgtagtatagagaccaaa

SEQ ID NO: 471 - RNA, 23 nt, synthetic construct
  misc_feature 1..23: note = Synthetic
  source 1..23: mol_type = other RNA
tgagtaaatcataaaacgggttt

SEQ ID NO: 472 - RNA, 23 nt, synthetic construct
  misc_feature 1..23: note = Synthetic
  source 1..23: mol_type = other RNA
attgtaggttggattttcgtagc

SEQ ID NO: 473 - DNA, 23 bp, synthetic construct
  misc_feature 1..23: note = Synthetic
  source 1..23: mol_type = other DNA
aatacattactgatgtgtggatt

SEQ ID NO: 474 - RNA, 23 nt, synthetic construct
  misc_feature 1..23: note = Synthetic
  source 1..23: mol_type = other RNA
ttcttggtaattgaagaccagca

SEQ ID NO: 475 - DNA, 23 bp, synthetic construct
  misc_feature 1..23: note = Synthetic
  source 1..23: mol_type = other DNA
ttcgtttcggtcaaagatggcat

SEQ ID NO: 476 - DNA, 23 bp, synthetic construct
  misc_feature 1..23: note = Synthetic
  source 1..23: mol_type = other DNA
tttcgtttcggtcaaagatggca

SEQ ID NO: 477 - RNA, 23 nt, synthetic construct
  misc_feature 1..23: note = Synthetic
  source 1..23: mol_type = other RNA
ttgtaggttggattttcgtagcc

SEQ ID NO: 478 - DNA, 23 bp, synthetic construct
  misc_feature 1..23: note = Synthetic
  source 1..23: mol_type = other DNA
atacattactgatgtgtggatta

SEQ ID NO: 479 - RNA, 23 nt, synthetic construct
  misc_feature 1..23: note = Synthetic
  source 1..23: mol_type = other RNA
atttcggtcaaagatggcatgag

SEQ ID NO: 480 - DNA, 23 bp, synthetic construct
  misc_feature 1..23: note = Synthetic
  source 1..23: mol_type = other DNA
ataggttggattttcgtagccgt

SEQ ID NO: 481 - DNA, 23 bp, synthetic construct
  misc_feature 1..23: note = Synthetic
  source 1..23: mol_type = other DNA
tttcggtcaaagatggcatgaga

SEQ ID NO: 482 - RNA, 23 nt, synthetic construct
  misc_feature 1..23: note = Synthetic
  source 1..23: mol_type = other RNA
atgatgaatggatgtgtactgtt

SEQ ID NO: 483 - RNA, 23 nt, synthetic construct
  misc_feature 1..23: note = Synthetic
  source 1..23: mol_type = other RNA
agttggattttcgtagccgttct

SEQ ID NO: 484 - RNA, 23 nt, synthetic construct
  misc_feature 1..23: note = Synthetic
  source 1..23: mol_type = other RNA
ttgtatcataaatgaaacttcag

SEQ ID NO: 485 - RNA, 23 nt, synthetic construct
  misc_feature 1..23: note = Synthetic
  source 1..23: mol_type = other RNA
agtttcggtcaaagatggcatga

SEQ ID NO: 486 - DNA, 23 bp, synthetic construct
  misc_feature 1..23: note = Synthetic
  source 1..23: mol_type = other DNA
attggattttcgtagccgttctg

SEQ ID NO: 487 - RNA, 23 nt, synthetic construct
  misc_feature 1..23: note = Synthetic
  source 1..23: mol_type = other RNA
aacataaaacaggcacgaagaaa

SEQ ID NO: 488 - RNA, 23 nt, synthetic construct
  misc_feature 1..23: note = Synthetic
  source 1..23: mol_type = other RNA
atttaacaggatctcgggcaaga

SEQ ID NO: 489 - RNA, 23 nt, synthetic construct
  misc_feature 1..23: note = Synthetic
  source 1..23: mol_type = other RNA
acacataaaacaggcacgaagaa

SEQ ID NO: 490 - DNA, 23 bp, synthetic construct
  misc_feature 1..23: note = Synthetic
  source 1..23: mol_type = other DNA
ataaactttgggacatggcgctg

SEQ ID NO: 491 - RNA, 23 nt, synthetic construct
  misc_feature 1..23: note = Synthetic
  source 1..23: mol_type = other RNA
aacgatcactgtcgctatgacaa

SEQ ID NO: 492 - DNA, 23 bp, synthetic construct
  misc_feature 1..23: note = Synthetic
  source 1..23: mol_type = other DNA
tgtaggttggattttcgtagccg

SEQ ID NO: 493 - RNA, 23 nt, synthetic construct
  misc_feature 1..23: note = Synthetic
  source 1..23: mol_type = other RNA
aatgacgatcactgtcgctatga

SEQ ID NO: 494 - RNA, 23 nt, synthetic construct
  misc_feature 1..23: note = Synthetic
  source 1..23: mol_type = other RNA
tttaacaggatctcgggcaagag

SEQ ID NO: 495 - RNA, 23 nt, synthetic construct
  misc_feature 1..23: note = Synthetic
  source 1..23: mol_type = other RNA
ttcggtcaaagatggcatgagag

SEQ ID NO: 496 - RNA, 23 nt, synthetic construct
  misc_feature 1..23: note = Synthetic
  source 1..23: mol_type = other RNA
aggttggattttcgtagccgttc

SEQ ID NO: 497 - RNA, 23 nt, synthetic construct
  misc_feature 1..23: note = Synthetic
  source 1..23: mol_type = other RNA
aaagaacaccaatttttgatgat

SEQ ID NO: 498 - RNA, 23 nt, synthetic construct
  misc_feature 1..23: note = Synthetic
  source 1..23: mol_type = other RNA
caaagaacttgtaggttggattt

SEQ ID NO: 499 - RNA, 23 nt, synthetic construct
  misc_feature 1..23: note = Synthetic
  source 1..23: mol_type = other RNA
tgtaatacagtgtagaaagcgat

SEQ ID NO: 500 - RNA, 23 nt, synthetic construct
  misc_feature 1..23: note = Synthetic
  source 1..23: mol_type = other RNA
tcaaagaacttgtaggttggatt

SEQ ID NO: 501 - RNA, 23 nt, synthetic construct
  misc_feature 1..23: note = Synthetic
  source 1..23: mol_type = other RNA
agaccaaaatgtaaagagagata

SEQ ID NO: 502 - RNA, 23 nt, synthetic construct
  misc_feature 1..23: note = Synthetic
  source 1..23: mol_type = other RNA
aagaccaaaatgtaaagagagat

SEQ ID NO: 503 - DNA, 23 bp, synthetic construct
  misc_feature 1..23: note = Synthetic
  source 1..23: mol_type = other DNA
aaattctttacagtacacaaaac

SEQ ID NO: 504 - DNA, 23 bp, synthetic construct
  misc_feature 1..23: note = Synthetic
  source 1..23: mol_type = other DNA
actaaattctttacagtacacaa

SEQ ID NO: 505 - RNA, 23 nt, synthetic construct
  misc_feature 1..23: note = Synthetic
  source 1..23: mol_type = other RNA
taaagtaggacttaattgggtca

SEQ ID NO: 506 - RNA, 23 nt, synthetic construct
  misc_feature 1..23: note = Synthetic
  source 1..23: mol_type = other RNA
taaagcatatgtaaagtaggact

SEQ ID NO: 507 - RNA, 23 nt, synthetic construct
  misc_feature 1..23: note = Synthetic
  source 1..23: mol_type = other RNA
ttaaagcatatgtaaagtaggac

SEQ ID NO: 508 - DNA, 23 bp, synthetic construct
  misc_feature 1..23: note = Synthetic
  source 1..23: mol_type = other DNA
tttatgtaatacagtgtagaaag

SEQ ID NO: 509 - RNA, 23 nt, synthetic construct
  misc_feature 1..23: note = Synthetic
  source 1..23: mol_type = other RNA
atttatgtaatacagtgtagaaa

SEQ ID NO: 510 - RNA, 23 nt, synthetic construct
  misc_feature 1..23: note = Synthetic
  source 1..23: mol_type = other RNA
attgaagacacatcttaaaagaa

SEQ ID NO: 511 - RNA, 23 nt, synthetic construct
  misc_feature 1..23: note = Synthetic
  source 1..23: mol_type = other RNA
ttatacaaattgaagacacatct

SEQ ID NO: 512 - RNA, 23 nt, synthetic construct
  misc_feature 1..23: note = Synthetic
  source 1..23: mol_type = other RNA
caaagaacaccaatttttgatga

SEQ ID NO: 513 - DNA, 23 bp, synthetic construct
  misc_feature 1..23: note = Synthetic
  source 1..23: mol_type = other DNA
aagaacttgtaggttggattttc

SEQ ID NO: 514 - RNA, 23 nt, synthetic construct
  misc_feature 1..23: note = Synthetic
  source 1..23: mol_type = other RNA
aagctaaattctttacagtacac

SEQ ID NO: 515 - RNA, 23 nt, synthetic construct
  misc_feature 1..23: note = Synthetic
  source 1..23: mol_type = other RNA
tatgtgataaataatcaggagag

SEQ ID NO: 516 - DNA, 23 bp, synthetic construct
  misc_feature 1..23: note = Synthetic
  source 1..23: mol_type = other DNA
aaagaataatatacaactggcta

SEQ ID NO: 517 - RNA, 23 nt, synthetic construct
  misc_feature 1..23: note = Synthetic
  source 1..23: mol_type = other RNA
tatgtaaagtaggacttaattgg

SEQ ID NO: 518 - RNA, 23 nt, synthetic construct
  misc_feature 1..23: note = Synthetic
  source 1..23: mol_type = other RNA
agaaaggaatacttaggcaagag

SEQ ID NO: 519 - RNA, 23 nt, synthetic construct
  misc_feature 1..23: note = Synthetic
  source 1..23: mol_type = other RNA
aatagtgatcaggaaaggaatac

SEQ ID NO: 520 - DNA, 23 bp, synthetic construct
  misc_feature 1..23: note = Synthetic
  source 1..23: mol_type = other DNA
tttaactttaaaatgcatagtga

SEQ ID NO: 521 - DNA, 23 bp, synthetic construct
  misc_feature 1..23: note = Synthetic
  source 1..23: mol_type = other DNA
taaaagtgcttacaatgaacagg

SEQ ID NO: 522 - RNA, 23 nt, synthetic construct
  misc_feature 1..23: note = Synthetic
  source 1..23: mol_type = other RNA
tttggagaattcttggtaattga

SEQ ID NO: 523 - RNA, 23 nt, synthetic construct
  misc_feature 1..23: note = Synthetic
  source 1..23: mol_type = other RNA
attttggagaattcttggtaatt

SEQ ID NO: 524 - DNA, 23 bp, synthetic construct
  misc_feature 1..23: note = Synthetic
  source 1..23: mol_type = other DNA
agatcatgtcataagcaatgatt

SEQ ID NO: 525 - RNA, 23 nt, synthetic construct
  misc_feature 1..23: note = Synthetic
  source 1..23: mol_type = other RNA
aattgaagacacatcttaaaaga

SEQ ID NO: 526 - RNA, 23 nt, synthetic construct
  misc_feature 1..23: note = Synthetic
  source 1..23: mol_type = other RNA
ttgtaggaagtttaacaggatct

SEQ ID NO: 527 - RNA, 23 nt, synthetic construct
  misc_feature 1..23: note = Synthetic
  source 1..23: mol_type = other RNA
acaagacgtcatctgaatagttt

SEQ ID NO: 528 - DNA, 23 bp, synthetic construct
  misc_feature 1..23: note = Synthetic
  source 1..23: mol_type = other DNA
aaccaatttttgatgatgaactt

SEQ ID NO: 529 - RNA, 23 nt, synthetic construct
  misc_feature 1..23: note = Synthetic
  source 1..23: mol_type = other RNA
accaaaatgtaaagagagataga

SEQ ID NO: 530 - RNA, 23 nt, synthetic construct
  misc_feature 1..23: note = Synthetic
  source 1..23: mol_type = other RNA
aaccaaaatgtaaagagagatag

SEQ ID NO: 531 - DNA, 23 bp, synthetic construct
  misc_feature 1..23: note = Synthetic
  source 1..23: mol_type = other DNA
ataaattctttacagtacacaaa

SEQ ID NO: 532 - RNA, 23 nt, synthetic construct
  misc_feature 1..23: note = Synthetic
  source 1..23: mol_type = other RNA
attaaagcatatgtaaagtagga

SEQ ID NO: 533 - RNA, 23 nt, synthetic construct
  misc_feature 1..23: note = Synthetic
  source 1..23: mol_type = other RNA
aaggaaaggaatacttaggcaag

SEQ ID NO: 534 - RNA, 23 nt, synthetic construct
  misc_feature 1..23: note = Synthetic
  source 1..23: mol_type = other RNA
atgatcaggaaaggaatacttag

SEQ ID NO: 535 - DNA, 23 bp, synthetic construct
  misc_feature 1..23: note = Synthetic
  source 1..23: mol_type = other DNA
tagtgatcaggaaaggaatactt

SEQ ID NO: 536 - RNA, 23 nt, synthetic construct
  misc_feature 1..23: note = Synthetic
  source 1..23: mol_type = other RNA
aaaatgcatagtgatcaggaaag

SEQ ID NO: 537 - RNA, 23 nt, synthetic construct
  misc_feature 1..23: note = Synthetic
  source 1..23: mol_type = other RNA
tttaaaatgcatagtgatcagga

SEQ ID NO: 538 - RNA, 23 nt, synthetic construct
  misc_feature 1..23: note = Synthetic
  source 1..23: mol_type = other RNA
tcaaagacccaaagatacgtgga

SEQ ID NO: 539 - DNA, 23 bp, synthetic construct
  misc_feature 1..23: note = Synthetic
  source 1..23: mol_type = other DNA
attttctttatcaaagacccaaa

SEQ ID NO: 540 - RNA, 23 nt, synthetic construct
  misc_feature 1..23: note = Synthetic
  source 1..23: mol_type = other RNA
tggagaattcttggtaattgaag

SEQ ID NO: 541 - RNA, 23 nt, synthetic construct
  misc_feature 1..23: note = Synthetic
  source 1..23: mol_type = other RNA
ataatacagtgtagaaagcgatc

SEQ ID NO: 542 - RNA, 23 nt, synthetic construct
  misc_feature 1..23: note = Synthetic
  source 1..23: mol_type = other RNA
ttcagactggttaaagaaaattg

SEQ ID NO: 543 - DNA, 23 bp, synthetic construct
  misc_feature 1..23: note = Synthetic
  source 1..23: mol_type = other DNA
gaaacttcagactggttaaagaa

SEQ ID NO: 544 - DNA, 23 bp, synthetic construct
  misc_feature 1..23: note = Synthetic
  source 1..23: mol_type = other DNA
acaaattgaagacacatcttaaa

SEQ ID NO: 545 - RNA, 23 nt, synthetic construct
  misc_feature 1..23: note = Synthetic
  source 1..23: mol_type = other RNA
tgtaggaagtttaacaggatctc

SEQ ID NO: 546 - RNA, 23 nt, synthetic construct
  misc_feature 1..23: note = Synthetic
  source 1..23: mol_type = other RNA
attttgctctttctgaagcagct

SEQ ID NO: 547 - RNA, 23 nt, synthetic construct
  misc_feature 1..23: note = Synthetic
  source 1..23: mol_type = other RNA
tgaatagttttgctctttctgaa

SEQ ID NO: 548 - RNA, 23 nt, synthetic construct
  misc_feature 1..23: note = Synthetic
  source 1..23: mol_type = other RNA
tttttgatgatgaacttcatatc

SEQ ID NO: 549 - RNA, 23 nt, synthetic construct
  misc_feature 1..23: note = Synthetic
  source 1..23: mol_type = other RNA
aaacaccaatttttgatgatgaa

SEQ ID NO: 550 - RNA, 23 nt, synthetic construct
  misc_feature 1..23: note = Synthetic
  source 1..23: mol_type = other RNA
acaaagaacaccaatttttgatg

SEQ ID NO: 551 - DNA, 23 bp, synthetic construct
  misc_feature 1..23: note = Synthetic
  source 1..23: mol_type = other DNA
agaacttgtaggttggattttcg

SEQ ID NO: 552 - RNA, 23 nt, synthetic construct
  misc_feature 1..23: note = Synthetic
  source 1..23: mol_type = other RNA
atcaaagaacttgtaggttggat

SEQ ID NO: 553 - RNA, 23 nt, synthetic construct
  misc_feature 1..23: note = Synthetic
  source 1..23: mol_type = other RNA
tgtcaaaaggcgataatgagtaa

SEQ ID NO: 554 - RNA, 23 nt, synthetic construct
  misc_feature 1..23: note = Synthetic
  source 1..23: mol_type = other RNA
atgtcaaaaggcgataatgagta

SEQ ID NO: 555 - DNA, 23 bp, synthetic construct
  misc_feature 1..23: note = Synthetic
  source 1..23: mol_type = other DNA
atctacttgtgttacagcacagc

SEQ ID NO: 556 - RNA, 23 nt, synthetic construct
  misc_feature 1..23: note = Synthetic
  source 1..23: mol_type = other RNA
aatctacttgtgttacagcacag

SEQ ID NO: 557 - RNA, 23 nt, synthetic construct
  misc_feature 1..23: note = Synthetic
  source 1..23: mol_type = other RNA
atagagaccaaaatgtaaagaga

SEQ ID NO: 558 - RNA, 23 nt, synthetic construct
  misc_feature 1..23: note = Synthetic
  source 1..23: mol_type = other RNA
tttacagtacacaaaacccatta

SEQ ID NO: 559 - RNA, 23 nt, synthetic construct
  misc_feature 1..23: note = Synthetic
  source 1..23: mol_type = other RNA
taaattctttacagtacacaaaa

SEQ ID NO: 560 - RNA, 23 nt, synthetic construct
  misc_feature 1..23: note = Synthetic
  source 1..23: mol_type = other RNA
aatgcactagtttgatacagcta

SEQ ID NO: 561 - RNA, 23 nt, synthetic construct
  misc_feature 1..23: note = Synthetic
  source 1..23: mol_type = other RNA
aagaatctattcatgcactagtt

SEQ ID NO: 562 - DNA, 23 bp, synthetic construct
  misc_feature 1..23: note = Synthetic
  source 1..23: mol_type = other DNA
agagaatctattcatgcactagt

SEQ ID NO: 563 - RNA, 23 nt, synthetic construct
  misc_feature 1..23: note = Synthetic
  source 1..23: mol_type = other RNA
tgtgataaataatcaggagagaa

SEQ ID NO: 564 - DNA, 23 bp, synthetic construct
  misc_feature 1..23: note = Synthetic
  source 1..23: mol_type = other DNA
actatgtgataaataatcaggag

SEQ ID NO: 565 - RNA, 23 nt, synthetic construct
  misc_feature 1..23: note = Synthetic
  source 1..23: mol_type = other RNA
acatatgtaaagtaggacttaat

SEQ ID NO: 566 - RNA, 23 nt, synthetic construct
  misc_feature 1..23: note = Synthetic
  source 1..23: mol_type = other RNA
aagcatatgtaaagtaggactta

SEQ ID NO: 567 - DNA, 23 bp, synthetic construct
  misc_feature 1..23: note = Synthetic
  source 1..23: mol_type = other DNA
aaagcatatgtaaagtaggactt

SEQ ID NO: 568 - RNA, 23 nt, synthetic construct
  misc_feature 1..23: note = Synthetic
  source 1..23: mol_type = other RNA
aggaatacttaggcaagagaagc

SEQ ID NO: 569 - RNA, 23 nt, synthetic construct
  misc_feature 1..23: note = Synthetic
  source 1..23: mol_type = other RNA
aaaggaatacttaggcaagagaa

SEQ ID NO: 570 - RNA, 23 nt, synthetic construct
  misc_feature 1..23: note = Synthetic
  source 1..23: mol_type = other RNA
atagtgatcaggaaaggaatact

SEQ ID NO: 571 - RNA, 23 nt, synthetic construct
  misc_feature 1..23: note = Synthetic
  source 1..23: mol_type = other RNA
aaatgcatagtgatcaggaaagg

SEQ ID NO: 572 - DNA, 23 bp, synthetic construct
  misc_feature 1..23: note = Synthetic
  source 1..23: mol_type = other DNA
ttaactttaaaatgcatagtgat

SEQ ID NO: 573 - DNA, 23 bp, synthetic construct
  misc_feature 1..23: note = Synthetic
  source 1..23: mol_type = other DNA
aatctgtacagtaaaatgcagtc

SEQ ID NO: 574 - RNA, 23 nt, synthetic construct
  misc_feature 1..23: note = Synthetic
  source 1..23: mol_type = other RNA
tatatcacaaatatagcagaagc

SEQ ID NO: 575 - RNA, 23 nt, synthetic construct
  misc_feature 1..23: note = Synthetic
  source 1..23: mol_type = other RNA
atatatcacaaatatagcagaag

SEQ ID NO: 576 - RNA, 23 nt, synthetic construct
  misc_feature 1..23: note = Synthetic
  source 1..23: mol_type = other RNA
atcaaagacccaaagatacgtgg

SEQ ID NO: 577 - DNA, 23 bp, synthetic construct
  misc_feature 1..23: note = Synthetic
  source 1..23: mol_type = other DNA
tctttatcaaagacccaaagata

SEQ ID NO: 578 - RNA, 23 nt, synthetic construct
  misc_feature 1..23: note = Synthetic
  source 1..23: mol_type = other RNA
ttctttatcaaagacccaaagat

SEQ ID NO: 579 - DNA, 23 bp, synthetic construct
  misc_feature 1..23: note = Synthetic
  source 1..23: mol_type = other DNA
ttttctttatcaaagacccaaag

SEQ ID NO: 580 - RNA, 23 nt, synthetic construct
  misc_feature 1..23: note = Synthetic
  source 1..23: mol_type = other RNA
attacaatgaacagggattcttt

SEQ ID NO: 581 - RNA, 23 nt, synthetic construct
  misc_feature 1..23: note = Synthetic
  source 1..23: mol_type = other RNA
acttacaatgaacagggattctt

SEQ ID NO: 582 - RNA, 23 nt, synthetic construct
  misc_feature 1..23: note = Synthetic
  source 1..23: mol_type = other RNA
ataaaagtgcttacaatgaacag

SEQ ID NO: 583 - RNA, 23 nt, synthetic construct
  misc_feature 1..23: note = Synthetic
  source 1..23: mol_type = other RNA
tagaaagcgatcatgtcataagc

SEQ ID NO: 584 - RNA, 23 nt, synthetic construct
  misc_feature 1..23: note = Synthetic
  source 1..23: mol_type = other RNA
tgtagaaagcgatcatgtcataa

SEQ ID NO: 585 - DNA, 23 bp, synthetic construct
  misc_feature 1..23: note = Synthetic
  source 1..23: mol_type = other DNA
acagtgtagaaagcgatcatgtc

SEQ ID NO: 586 - RNA, 23 nt, synthetic construct
  misc_feature 1..23: note = Synthetic
  source 1..23: mol_type = other RNA
tatgtaatacagtgtagaaagcg

SEQ ID NO: 587 - RNA, 23 nt, synthetic construct
  misc_feature 1..23: note = Synthetic
  source 1..23: mol_type = other RNA
atggttaaagaaaattgaatctg

SEQ ID NO: 588 - RNA, 23 nt, synthetic construct
  misc_feature 1..23: note = Synthetic
  source 1..23: mol_type = other RNA
acttcagactggttaaagaaaat

SEQ ID NO: 589 - RNA, 23 nt, synthetic construct
  misc_feature 1..23: note = Synthetic
  source 1..23: mol_type = other RNA
aaattgaagacacatcttaaaag

SEQ ID NO: 590 - RNA, 23 nt, synthetic construct
  misc_feature 1..23: note = Synthetic
  source 1..23: mol_type = other RNA
caaattgaagacacatcttaaaa

SEQ ID NO: 591 - RNA, 23 nt, synthetic construct
  misc_feature 1..23: note = Synthetic
  source 1..23: mol_type = other RNA
atacaaattgaagacacatctta

SEQ ID NO: 592 - DNA, 23 bp, synthetic construct
  misc_feature 1..23: note = Synthetic
  source 1..23: mol_type = other DNA
attttatacaaattgaagacaca

SEQ ID NO: 593 - DNA, 23 bp, synthetic construct
  misc_feature 1..23: note = Synthetic
  source 1..23: mol_type = other DNA
accattttatacaaattgaagac

SEQ ID NO: 594 - RNA, 23 nt, synthetic construct
  misc_feature 1..23: note = Synthetic
  source 1..23: mol_type = other RNA
ttatttacatgaaaacaccattt

SEQ ID NO: 595 - RNA, 23 nt, synthetic construct
  misc_feature 1..23: note = Synthetic
  source 1..23: mol_type = other RNA
tgaagacacatcttaaaagaagg

SEQ ID NO: 596 - RNA, 23 nt, synthetic construct
  misc_feature 1..23: note = Synthetic
  source 1..23: mol_type = other RNA
tgtaaagagagatagaatacatt

SEQ ID NO: 597 - RNA, 23 nt, synthetic construct
  misc_feature 1..23: note = Synthetic
  source 1..23: mol_type = other RNA
ttaataatgtagtatagagacca

SEQ ID NO: 598 - RNA, 23 nt, synthetic construct
  misc_feature 1..23: note = Synthetic
  source 1..23: mol_type = other RNA
attaataatgtagtatagagacc

SEQ ID NO: 599 - DNA, 23 bp, synthetic construct
  misc_feature 1..23: note = Synthetic
  source 1..23: mol_type = other DNA
aattaataatgtagtatagagac

SEQ ID NO: 600 - DNA, 23 bp, synthetic construct
  misc_feature 1..23: note = Synthetic
  source 1..23: mol_type = other DNA
aagaattcttggtaattgaagac

SEQ ID NO: 601 - RNA, 23 nt, synthetic construct
  misc_feature 1..23: note = Synthetic
  source 1..23: mol_type = other RNA
aaatacattactgatgtgtggat

SEQ ID NO: 602 - DNA, 23 bp, synthetic construct
  misc_feature 1..23: note = Synthetic
  source 1..23: mol_type = other DNA
acaaaatgtaaagagagatagaa

SEQ ID NO: 603 - DNA, 23 bp, synthetic construct
  misc_feature 1..23: note = Synthetic
  source 1..23: mol_type = other DNA
taataatgtagtatagagaccaa

SEQ ID NO: 604 - RNA, 23 nt, synthetic construct
  misc_feature 1..23: note = Synthetic
  source 1..23: mol_type = other RNA
acattaataatgtagtatagaga

SEQ ID NO: 605 - DNA, 23 bp, synthetic construct
  misc_feature 1..23: note = Synthetic
  source 1..23: mol_type = other DNA
aattcttggtaattgaagaccag

SEQ ID NO: 606 - RNA, 23 nt, synthetic construct
  misc_feature 1..23: note = Synthetic
  source 1..23: mol_type = other RNA
aatgatgaacttcatatcctgag

SEQ ID NO: 607 - RNA, 23 nt, synthetic construct
  misc_feature 1..23: note = Synthetic
  source 1..23: mol_type = other RNA
tagaatacattactgatgtgtgg

SEQ ID NO: 608 - RNA, 23 nt, synthetic construct
  misc_feature 1..23: note = Synthetic
  source 1..23: mol_type = other RNA
accattaataatgtagtatagag

SEQ ID NO: 609 - RNA, 23 nt, synthetic construct
  misc_feature 1..23: note = Synthetic
  source 1..23: mol_type = other RNA
atgagtaaatcataaaacgggtt

SEQ ID NO: 610 - RNA, 23 nt, synthetic construct
  misc_feature 1..23: note = Synthetic
  source 1..23: mol_type = other RNA
aagtaaaatgcagtcatggaaaa

SEQ ID NO: 611 - RNA, 23 nt, synthetic construct
  misc_feature 1..23: note = Synthetic
  source 1..23: mol_type = other RNA
agaattcttggtaattgaagacc

SEQ ID NO: 612 - DNA, 23 bp, synthetic construct
  misc_feature 1..23: note = Synthetic
  source 1..23: mol_type = other DNA
atatcataaatgaaacttcagac

SEQ ID NO: 613 - RNA, 23 nt, synthetic construct
  misc_feature 1..23: note = Synthetic
  source 1..23: mol_type = other RNA
gtgacccaattaagtcctacttt

SEQ ID NO: 614 - RNA, 23 nt, synthetic construct
  misc_feature 1..23: note = Synthetic
  source 1..23: mol_type = other RNA
tctctcctgattatttatcacat

SEQ ID NO: 615 - RNA, 23 nt, synthetic construct
  misc_feature 1..23: note = Synthetic
  source 1..23: mol_type = other RNA
tgcctgaacttgaattaatccac

SEQ ID NO: 616 - RNA, 23 nt, synthetic construct
  misc_feature 1..23: note = Synthetic
  source 1..23: mol_type = other RNA
tgggttcaaacaaaggtgcaatc

SEQ ID NO: 617 - RNA, 23 nt, synthetic construct
  misc_feature 1..23: note = Synthetic
  source 1..23: mol_type = other RNA
gatttactcattatcgccttttg

SEQ ID NO: 618 - RNA, 23 nt, synthetic construct
  misc_feature 1..23: note = Synthetic
  source 1..23: mol_type = other RNA
gaatttagctgtatcaaactagt

SEQ ID NO: 619 - RNA, 23 nt, synthetic construct
  misc_feature 1..23: note = Synthetic
  source 1..23: mol_type = other RNA
taagtattcctttcctgatcact

SEQ ID NO: 620 - RNA, 23 nt, synthetic construct
  misc_feature 1..23: note = Synthetic
  source 1..23: mol_type = other RNA
ttgcttatgacatgatcgctttc

SEQ ID NO: 621 - RNA, 23 nt, synthetic construct
  misc_feature 1..23: note = Synthetic
  source 1..23: mol_type = other RNA
ttaagatgtgtcttcaatttgta

SEQ ID NO: 622 - RNA, 23 nt, synthetic construct
  misc_feature 1..23: note = Synthetic
  source 1..23: mol_type = other RNA
cagcaaaaccattgcttcactac

SEQ ID NO: 623 - RNA, 23 nt, synthetic construct
  misc_feature 1..23: note = Synthetic
  source 1..23: mol_type = other RNA
tgatttactcattatcgcctttt

SEQ ID NO: 624 - RNA, 23 nt, synthetic construct
  misc_feature 1..23: note = Synthetic
  source 1..23: mol_type = other RNA
tttactcattatcgccttttgac

SEQ ID NO: 625 - RNA, 23 nt, synthetic construct
  misc_feature 1..23: note = Synthetic
  source 1..23: mol_type = other RNA
gatgcctgaacttgaattaatcc

SEQ ID NO: 626 - RNA, 23 nt, synthetic construct
  misc_feature 1..23: note = Synthetic
  source 1..23: mol_type = other RNA
gcctgaacttgaattaatccaca

SEQ ID NO: 627 - RNA, 23 nt, synthetic construct
  misc_feature 1..23: note = Synthetic
  source 1..23: mol_type = other RNA
aatttagctgtatcaaactagtg

SEQ ID NO: 628 - RNA, 23 nt, synthetic construct
  misc_feature 1..23: note = Synthetic
  source 1..23: mol_type = other RNA
atgaatagattctctcctgatta

SEQ ID NO: 629 - RNA, 23 nt, synthetic construct
  misc_feature 1..23: note = Synthetic
  source 1..23: mol_type = other RNA
tctcctgattatttatcacatag

SEQ ID NO: 630 - RNA, 23 nt, synthetic construct
  misc_feature 1..23: note = Synthetic
  source 1..23: mol_type = other RNA
gacccaattaagtcctactttac

SEQ ID NO: 631 - RNA, 23 nt, synthetic construct
  misc_feature 1..23: note = Synthetic
  source 1..23: mol_type = other RNA
tacatatgctttaagaatcgatg

SEQ ID NO: 632 - RNA, 23 nt, synthetic construct
  misc_feature 1..23: note = Synthetic
  source 1..23: mol_type = other RNA
tgcttctcttgcctaagtattcc

SEQ ID NO: 633 - RNA, 23 nt, synthetic construct
  misc_feature 1..23: note = Synthetic
  source 1..23: mol_type = other RNA
atcattgcttatgacatgatcgc

SEQ ID NO: 634 - RNA, 23 nt, synthetic construct
  misc_feature 1..23: note = Synthetic
  source 1..23: mol_type = other RNA
tgcttatgacatgatcgctttct

SEQ ID NO: 635 - RNA, 23 nt, synthetic construct
  misc_feature 1..23: note = Synthetic
  source 1..23: mol_type = other RNA
cttatgacatgatcgctttctac

SEQ ID NO: 636 - RNA, 23 nt, synthetic construct
  misc_feature 1..23: note = Synthetic
  source 1..23: mol_type = other RNA
tatgacatgatcgctttctacac

SEQ ID NO: 637 - RNA, 23 nt, synthetic construct
  misc_feature 1..23: note = Synthetic
  source 1..23: mol_type = other RNA
atgatcgctttctacactgtatt

SEQ ID NO: 638 - RNA, 23 nt, synthetic construct
  misc_feature 1..23: note = Synthetic
  source 1..23: mol_type = other RNA
gcaaaactattcagatgacgtct

SEQ ID NO: 639 - RNA, 23 nt, synthetic construct
  misc_feature 1..23: note = Synthetic
  source 1..23: mol_type = other RNA
caaaactattcagatgacgtctt

SEQ ID NO: 640 - RNA, 23 nt, synthetic construct
  misc_feature 1..23: note = Synthetic
  source 1..23: mol_type = other RNA
ctacgaaaatccaacctacaagt

SEQ ID NO: 641 - RNA, 23 nt, synthetic construct
  misc_feature 1..23: note = Synthetic
  source 1..23: mol_type = other RNA
gctgcttctcttgcctaagtatt

SEQ ID NO: 642 - RNA, 23 nt, synthetic construct
  misc_feature 1..23: note = Synthetic
  source 1..23: mol_type = other RNA
attgcttatgacatgatcgcttt

SEQ ID NO: 643 - RNA, 23 nt, synthetic construct
  misc_feature 1..23: note = Synthetic
  source 1..23: mol_type = other RNA
catgatcgctttctacactgtat

SEQ ID NO: 644 - RNA, 23 nt, synthetic construct
  misc_feature 1..23: note = Synthetic
  source 1..23: mol_type = other RNA
tgatcgctttctacactgtatta

SEQ ID NO: 645 - RNA, 23 nt, synthetic construct
  misc_feature 1..23: note = Synthetic
  source 1..23: mol_type = other RNA
catctttgaccgaaacgaaaacc

SEQ ID NO: 646 - RNA, 23 nt, synthetic construct
  misc_feature 1..23: note = Synthetic
  source 1..23: mol_type = other RNA
aggttctgggttgacaaatatca

SEQ ID NO: 647 - RNA, 23 nt, synthetic construct
  misc_feature 1..23: note = Synthetic
  source 1..23: mol_type = other RNA
tctgggttgacaaatatcaagac

SEQ ID NO: 648 - RNA, 23 nt, synthetic construct
  misc_feature 1..23: note = Synthetic
  source 1..23: mol_type = other RNA
atgatttactcattatcgccttt

SEQ ID NO: 649 - RNA, 23 nt, synthetic construct
  misc_feature 1..23: note = Synthetic
  source 1..23: mol_type = other RNA
attcctttcctgatcactatgca

SEQ ID NO: 650 - RNA, 23 nt, synthetic construct
  misc_feature 1..23: note = Synthetic
  source 1..23: mol_type = other RNA
tcctttcctgatcactatgcatt

SEQ ID NO: 651 - RNA, 23 nt, synthetic construct
  misc_feature 1..23: note = Synthetic
  source 1..23: mol_type = other RNA
tcattgcttatgacatgatcgct

SEQ ID NO: 652 - RNA, 23 nt, synthetic construct
  misc_feature 1..23: note = Synthetic
  source 1..23: mol_type = other RNA
tttctttaaccagtctgaagttt

SEQ ID NO: 653 - RNA, 23 nt, synthetic construct
  misc_feature 1..23: note = Synthetic
  source 1..23: mol_type = other RNA
aaggatcagttacggaaacgatg

SEQ ID NO: 654 - RNA, 23 nt, synthetic construct
  misc_feature 1..23: note = Synthetic
  source 1..23: mol_type = other RNA
ttctgggttgacaaatatcaaga

SEQ ID NO: 655 - RNA, 23 nt, synthetic construct
  misc_feature 1..23: note = Synthetic
  source 1..23: mol_type = other RNA
ttatgatttactcattatcgcct

SEQ ID NO: 656 - RNA, 23 nt, synthetic construct
  misc_feature 1..23: note = Synthetic
  source 1..23: mol_type = other RNA
ttcttgtggtttgtgacccaatt

SEQ ID NO: 657 - RNA, 23 nt, synthetic construct
  misc_feature 1..23: note = Synthetic
  source 1..23: mol_type = other RNA
acatatgctttaagaatcgatgg

SEQ ID NO: 658 - RNA, 23 nt, synthetic construct
  misc_feature 1..23: note = Synthetic
  source 1..23: mol_type = other RNA
tttttgtccacgtatctttgggt

SEQ ID NO: 659 - RNA, 23 nt, synthetic construct
  misc_feature 1..23: note = Synthetic
  source 1..23: mol_type = other RNA
gttcattgtaagcacttttacgg

SEQ ID NO: 660 - RNA, 23 nt, synthetic construct
  misc_feature 1..23: note = Synthetic
  source 1..23: mol_type = other RNA
ttggccaacatgattagtgaacc

SEQ ID NO: 661 - RNA, 23 nt, synthetic construct
  misc_feature 1..23: note = Synthetic
  source 1..23: mol_type = other RNA
aggatcagttacggaaacgatgc

SEQ ID NO: 662 - RNA, 23 nt, synthetic construct
  misc_feature 1..23: note = Synthetic
  source 1..23: mol_type = other RNA
gttacggaaacgatgctctcatg

SEQ ID NO: 663 - RNA, 23 nt, synthetic construct
  misc_feature 1..23: note = Synthetic
  source 1..23: mol_type = other RNA
tatgatttactcattatcgcctt

SEQ ID NO: 664 - RNA, 23 nt, synthetic construct
  misc_feature 1..23: note = Synthetic
  source 1..23: mol_type = other RNA
aagtagatgcctgaacttgaatt

SEQ ID NO: 665 - RNA, 23 nt, synthetic construct
  misc_feature 1..23: note = Synthetic
  source 1..23: mol_type = other RNA
agttgtatattattcttgtggtt

SEQ ID NO: 666 - RNA, 23 nt, synthetic construct
  misc_feature 1..23: note = Synthetic
  source 1..23: mol_type = other RNA
agattgctgcttctgctatattt

SEQ ID NO: 667 - RNA, 23 nt, synthetic construct
  misc_feature 1..23: note = Synthetic
  source 1..23: mol_type = other RNA
tctgctatatttgtgatatagga

SEQ ID NO: 668 - RNA, 23 nt, synthetic construct
  misc_feature 1..23: note = Synthetic
  source 1..23: mol_type = other RNA
gcacacattaggcattgagactt

SEQ ID NO: 669 - RNA, 23 nt, synthetic construct
  misc_feature 1..23: note = Synthetic
  source 1..23: mol_type = other RNA
aaaagaatccctgttcattgtaa

SEQ ID NO: 670 - RNA, 23 nt, synthetic construct
  misc_feature 1..23: note = Synthetic
  source 1..23: mol_type = other RNA
ttcattgtaagcacttttacggg

SEQ ID NO: 671 - RNA, 23 nt, synthetic construct
  misc_feature 1..23: note = Synthetic
  source 1..23: mol_type = other RNA
cattgcttatgacatgatcgctt

SEQ ID NO: 672 - RNA, 23 nt, synthetic construct
  misc_feature 1..23: note = Synthetic
  source 1..23: mol_type = other RNA
accaaggatcagttacggaaacg

SEQ ID NO: 673 - RNA, 23 nt, synthetic construct
  misc_feature 1..23: note = Synthetic
  source 1..23: mol_type = other RNA
ccaggttctgggttgacaaatat

SEQ ID NO: 674 - RNA, 23 nt, synthetic construct
  misc_feature 1..23: note = Synthetic
  source 1..23: mol_type = other RNA
agaagatgtgggttcaaacaaag

SEQ ID NO: 675 - RNA, 23 nt, synthetic construct
  misc_feature 1..23: note = Synthetic
  source 1..23: mol_type = other RNA
tgctgaagaagaaacagtacaca

SEQ ID NO: 676 - RNA, 23 nt, synthetic construct
  misc_feature 1..23: note = Synthetic
  source 1..23: mol_type = other RNA
tgaagttggacagcaaaaccatt

SEQ ID NO: 677 - RNA, 23 nt, synthetic construct
  misc_feature 1..23: note = Synthetic
  source 1..23: mol_type = other RNA
ccatcggtgtccatttatagaat

SEQ ID NO: 678 - RNA, 23 nt, synthetic construct
  misc_feature 1..23: note = Synthetic
  source 1..23: mol_type = other RNA
catcggtgtccatttatagaata

SEQ ID NO: 679 - RNA, 23 nt, synthetic construct
  misc_feature 1..23: note = Synthetic
  source 1..23: mol_type = other RNA
gtgctgtaacacaagtagatgcc

SEQ ID NO: 680 - RNA, 23 nt, synthetic construct
  misc_feature 1..23: note = Synthetic
  source 1..23: mol_type = other RNA
acaagtagatgcctgaacttgaa

SEQ ID NO: 681 - RNA, 23 nt, synthetic construct
  misc_feature 1..23: note = Synthetic
  source 1..23: mol_type = other RNA
tcttgtggtttgtgacccaatta

SEQ ID NO: 682 - RNA, 23 nt, synthetic construct
  misc_feature 1..23: note = Synthetic
  source 1..23: mol_type = other RNA
tggtttgtgacccaattaagtcc

SEQ ID NO: 683 - RNA, 23 nt, synthetic construct
  misc_feature 1..23: note = Synthetic
  source 1..23: mol_type = other RNA
ttgtgacccaattaagtcctact

SEQ ID NO: 684 - RNA, 23 nt, synthetic construct
  misc_feature 1..23: note = Synthetic
  source 1..23: mol_type = other RNA
catatgctttaagaatcgatggg

SEQ ID NO: 685 - RNA, 23 nt, synthetic construct
  misc_feature 1..23: note = Synthetic
  source 1..23: mol_type = other RNA
tatttgtgatataggaattaaga

SEQ ID NO: 686 - RNA, 23 nt, synthetic construct
  misc_feature 1..23: note = Synthetic
  source 1..23: mol_type = other RNA
gaaaagaatccctgttcattgta

SEQ ID NO: 687 - RNA, 23 nt, synthetic construct
  misc_feature 1..23: note = Synthetic
  source 1..23: mol_type = other RNA
gatgattgtacagaatcattgct

SEQ ID NO: 688 - RNA, 23 nt, synthetic construct
  misc_feature 1..23: note = Synthetic
  source 1..23: mol_type = other RNA
catgcctggacaaacccttcttt

SEQ ID NO: 689 - RNA, 23 nt, synthetic construct
  misc_feature 1..23: note = Synthetic
  source 1..23: mol_type = other RNA
aagagcaaaactattcagatgac

SEQ ID NO: 690 - RNA, 23 nt, synthetic construct
  misc_feature 1..23: note = Synthetic
  source 1..23: mol_type = other RNA
ttagtgaaccaaggatcagttac

SEQ ID NO: 691 - RNA, 23 nt, synthetic construct
  misc_feature 1..23: note = Synthetic
  source 1..23: mol_type = other RNA
agtgaaccaaggatcagttacgg

SEQ ID NO: 692 - RNA, 23 nt, synthetic construct
  misc_feature 1..23: note = Synthetic
  source 1..23: mol_type = other RNA
atcagttacggaaacgatgctct

SEQ ID NO: 693 - RNA, 23 nt, synthetic construct
  misc_feature 1..23: note = Synthetic
  source 1..23: mol_type = other RNA
gcagaagatgtgggttcaaacaa

SEQ ID NO: 694 - RNA, 23 nt, synthetic construct
  misc_feature 1..23: note = Synthetic
  source 1..23: mol_type = other RNA
agcctctgaagttggacagcaaa

SEQ ID NO: 695 - RNA, 23 nt, synthetic construct
  misc_feature 1..23: note = Synthetic
  source 1..23: mol_type = other RNA
ttttatgatttactcattatcgc

SEQ ID NO: 696 - RNA, 23 nt, synthetic construct
  misc_feature 1..23: note = Synthetic
  source 1..23: mol_type = other RNA
tgacagctgtgctgtaacacaag

SEQ ID NO: 697 - RNA, 23 nt, synthetic construct
  misc_feature 1..23: note = Synthetic
  source 1..23: mol_type = other RNA
tttgtgacccaattaagtcctac

SEQ ID NO: 698 - RNA, 23 nt, synthetic construct
  misc_feature 1..23: note = Synthetic
  source 1..23: mol_type = other RNA
tttacatatgctttaagaatcga

SEQ ID NO: 699 - RNA, 23 nt, synthetic construct
  misc_feature 1..23: note = Synthetic
  source 1..23: mol_type = other RNA
atgtaaataaatacattcttgga

SEQ ID NO: 700 - RNA, 23 nt, synthetic construct
  misc_feature 1..23: note = Synthetic
  source 1..23: mol_type = other RNA
gatcagttacggaaacgatgctc

SEQ ID NO: 701 - RNA, 23 nt, synthetic construct
  misc_feature 1..23: note = Synthetic
  source 1..23: mol_type = other RNA
tccttcccgtgaatggagagttc

SEQ ID NO: 702 - RNA, 23 nt, synthetic construct
  misc_feature 1..23: note = Synthetic
  source 1..23: mol_type = other RNA
gaagttggacagcaaaaccattg

SEQ ID NO: 703 - RNA, 23 nt, synthetic construct
  misc_feature 1..23: note = Synthetic
  source 1..23: mol_type = other RNA
tacccatcggtgtccatttatag

SEQ ID NO: 704 - RNA, 23 nt, synthetic construct
  misc_feature 1..23: note = Synthetic
  source 1..23: mol_type = other RNA
tgtgcacacattaggcattgaga

SEQ ID NO: 705 - RNA, 23 nt, synthetic construct
  misc_feature 1..23: note = Synthetic
  source 1..23: mol_type = other RNA
ggccaacatgattagtgaaccaa

SEQ ID NO: 706 - RNA, 23 nt, synthetic construct
  misc_feature 1..23: note = Synthetic
  source 1..23: mol_type = other RNA
acatgattagtgaaccaaggatc

SEQ ID NO: 707 - RNA, 23 nt, synthetic construct
  misc_feature 1..23: note = Synthetic
  source 1..23: mol_type = other RNA
gattagtgaaccaaggatcagtt

SEQ ID NO: 708 - RNA, 23 nt, synthetic construct
  misc_feature 1..23: note = Synthetic
  source 1..23: mol_type = other RNA
tgaaccaaggatcagttacggaa

SEQ ID NO: 709 - RNA, 23 nt, synthetic construct
  misc_feature 1..23: note = Synthetic
  source 1..23: mol_type = other RNA
cagttacggaaacgatgctctca

SEQ ID NO: 710 - RNA, 23 nt, synthetic construct
  misc_feature 1..23: note = Synthetic
  source 1..23: mol_type = other RNA
tggatgcagaattccgacatgac

SEQ ID NO: 711 - RNA, 23 nt, synthetic construct
  misc_feature 1..23: note = Synthetic
  source 1..23: mol_type = other RNA
agttggacagcaaaaccattgct

SEQ ID NO: 712 - RNA, 23 nt, synthetic construct
  misc_feature 1..23: note = Synthetic
  source 1..23: mol_type = other RNA
caaaaccattgcttcactaccca

SEQ ID NO: 713 - RNA, 23 nt, synthetic construct
  misc_feature 1..23: note = Synthetic
  source 1..23: mol_type = other RNA
acccatcggtgtccatttataga

SEQ ID NO: 714 - RNA, 23 nt, synthetic construct
  misc_feature 1..23: note = Synthetic
  source 1..23: mol_type = other RNA
cattatcgccttttgacagctgt

SEQ ID NO: 715 - RNA, 23 nt, synthetic construct
  misc_feature 1..23: note = Synthetic
  source 1..23: mol_type = other RNA
ttatcgccttttgacagctgtgc

SEQ ID NO: 716 - RNA, 23 nt, synthetic construct
  misc_feature 1..23: note = Synthetic
  source 1..23: mol_type = other RNA
taacacaagtagatgcctgaact

SEQ ID NO: 717 - RNA, 23 nt, synthetic construct
  misc_feature 1..23: note = Synthetic
  source 1..23: mol_type = other RNA
cttgtggtttgtgacccaattaa

SEQ ID NO: 718 - RNA, 23 nt, synthetic construct
  misc_feature 1..23: note = Synthetic
  source 1..23: mol_type = other RNA
gggggatgcttcatgtgaacgtg

SEQ ID NO: 719 - RNA, 23 nt, synthetic construct
  misc_feature 1..23: note = Synthetic
  source 1..23: mol_type = other RNA
tatgtgcacacattaggcattga

SEQ ID NO: 720 - RNA, 23 nt, synthetic construct
  misc_feature 1..23: note = Synthetic
  source 1..23: mol_type = other RNA
gaaaatggaagtggcaatataag

SEQ ID NO: 721 - RNA, 23 nt, synthetic construct
  misc_feature 1..23: note = Synthetic
  source 1..23: mol_type = other RNA
aaatggaagtggcaatataaggg

SEQ ID NO: 722 - RNA, 23 nt, synthetic construct
  misc_feature 1..23: note = Synthetic
  source 1..23: mol_type = other RNA
cttgcccgagatcctgttaaact

SEQ ID NO: 723 - RNA, 23 nt, synthetic construct
  misc_feature 1..23: note = Synthetic
  source 1..23: mol_type = other RNA
tgattagtgaaccaaggatcagt

SEQ ID NO: 724 - RNA, 23 nt, synthetic construct
  misc_feature 1..23: note = Synthetic
  source 1..23: mol_type = other RNA
gtgaaccaaggatcagttacgga

SEQ ID NO: 725 - RNA, 23 nt, synthetic construct
  misc_feature 1..23: note = Synthetic
  source 1..23: mol_type = other RNA
ccaaggatcagttacggaaacga

SEQ ID NO: 726 - RNA, 23 nt, synthetic construct
  misc_feature 1..23: note = Synthetic
  source 1..23: mol_type = other RNA
gccaacacagaaaacgaagttga

SEQ ID NO: 727 - RNA, 23 nt, synthetic construct
  misc_feature 1..23: note = Synthetic
  source 1..23: mol_type = other RNA
tgtgggttcaaacaaaggtgcaa

SEQ ID NO: 728 - RNA, 23 nt, synthetic construct
  misc_feature 1..23: note = Synthetic
  source 1..23: mol_type = other RNA
gacagtgatcgtcatcaccttgg

SEQ ID NO: 729 - RNA, 23 nt, synthetic construct
  misc_feature 1..23: note = Synthetic
  source 1..23: mol_type = other RNA
ctacccatcggtgtccatttata

SEQ ID NO: 730 - RNA, 23 nt, synthetic construct
  misc_feature 1..23: note = Synthetic
  source 1..23: mol_type = other RNA
attcttgtggtttgtgacccaat

SEQ ID NO: 731 - RNA, 23 nt, synthetic construct
  misc_feature 1..23: note = Synthetic
  source 1..23: mol_type = other RNA
ggtttgtgacccaattaagtcct

SEQ ID NO: 732 - RNA, 23 nt, synthetic construct
  misc_feature 1..23: note = Synthetic
  source 1..23: mol_type = other RNA
gtttgtgacccaattaagtccta

SEQ ID NO: 733 - RNA, 23 nt, synthetic construct
  misc_feature 1..23: note = Synthetic
  source 1..23: mol_type = other RNA
tattcagatgacgtcttggccaa

SEQ ID NO: 734 - RNA, 23 nt, synthetic construct
  misc_feature 1..23: note = Synthetic
  source 1..23: mol_type = other RNA
ggatcagttacggaaacgatgct

SEQ ID NO: 735 - RNA, 23 nt, synthetic construct
  misc_feature 1..23: note = Synthetic
  source 1..23: mol_type = other RNA
gatggatgcagaattccgacatg

SEQ ID NO: 736 - RNA, 23 nt, synthetic construct
  misc_feature 1..23: note = Synthetic
  source 1..23: mol_type = other RNA
ctgtccaagatgcagcagaacgg

SEQ ID NO: 737 - RNA, 23 nt, synthetic construct
  misc_feature 1..23: note = Synthetic
  source 1..23: mol_type = other RNA
actacccatcggtgtccatttat

SEQ ID NO: 738 - RNA, 23 nt, synthetic construct
  misc_feature 1..23: note = Synthetic
  source 1..23: mol_type = other RNA
ccttttgacagctgtgctgtaac

SEQ ID NO: 739 - RNA, 23 nt, synthetic construct
  misc_feature 1..23: note = Synthetic
  source 1..23: mol_type = other RNA
ttttgacagctgtgctgtaacac

SEQ ID NO: 740 - RNA, 23 nt, synthetic construct
  misc_feature 1..23: note = Synthetic
  source 1..23: mol_type = other RNA
acagctgtgctgtaacacaagta

SEQ ID NO: 741 - RNA, 23 nt, synthetic construct
  misc_feature 1..23: note = Synthetic
  source 1..23: mol_type = other RNA
ctgttttatgtgcacacattagg

SEQ ID NO: 742 - RNA, 23 nt, synthetic construct
  misc_feature 1..23: note = Synthetic
  source 1..23: mol_type = other RNA
tcttcaattaccaagaattctcc

SEQ ID NO: 743 - RNA, 23 nt, synthetic construct
  misc_feature 1..23: note = Synthetic
  source 1..23: mol_type = other RNA
tccacacatcagtaatgtattct

SEQ ID NO: 744 - RNA, 23 nt, synthetic construct
  misc_feature 1..23: note = Synthetic
  source 1..23: mol_type = other RNA
tttggtctctatactacattatt

SEQ ID NO: 745 - RNA, 23 nt, synthetic construct
  misc_feature 1..23: note = Synthetic
  source 1..23: mol_type = other RNA
aaacccgttttatgatttactca

SEQ ID NO: 746 - RNA, 23 nt, synthetic construct
  misc_feature 1..23: note = Synthetic
  source 1..23: mol_type = other RNA
gctacgaaaatccaacctacaag

SEQ ID NO: 747 - RNA, 23 nt, synthetic construct
  misc_feature 1..23: note = Synthetic
  source 1..23: mol_type = other RNA
aatccacacatcagtaatgtatt

SEQ ID NO: 748 - RNA, 23 nt, synthetic construct
  misc_feature 1..23: note = Synthetic
  source 1..23: mol_type = other RNA
tgctggtcttcaattaccaagaa

SEQ ID NO: 749 - RNA, 23 nt, synthetic construct
  misc_feature 1..23: note = Synthetic
  source 1..23: mol_type = other RNA
atgccatctttgaccgaaacgaa

SEQ ID NO: 750 - RNA, 23 nt, synthetic construct
  misc_feature 1..23: note = Synthetic
  source 1..23: mol_type = other RNA
tgccatctttgaccgaaacgaaa

SEQ ID NO: 751 - RNA, 23 nt, synthetic construct
  misc_feature 1..23: note = Synthetic
  source 1..23: mol_type = other RNA
ggctacgaaaatccaacctacaa

SEQ ID NO: 752 - RNA, 23 nt, synthetic construct
  misc_feature 1..23: note = Synthetic
  source 1..23: mol_type = other RNA
taatccacacatcagtaatgtat

SEQ ID NO: 753 - RNA, 23 nt, synthetic construct
  misc_feature 1..23: note = Synthetic
  source 1..23: mol_type = other RNA
ctcatgccatctttgaccgaaac

SEQ ID NO: 754 - RNA, 23 nt, synthetic construct
  misc_feature 1..23: note = Synthetic
  source 1..23: mol_type = other RNA
acggctacgaaaatccaacctac

SEQ ID NO: 755 - RNA, 23 nt, synthetic construct
  misc_feature 1..23: note = Synthetic
  source 1..23: mol_type = other RNA
tctcatgccatctttgaccgaaa

SEQ ID NO: 756 - RNA, 23 nt, synthetic construct
  misc_feature 1..23: note = Synthetic
  source 1..23: mol_type = other RNA
aacagtacacatccattcatcat

SEQ ID NO: 757 - RNA, 23 nt, synthetic construct
  misc_feature 1..23: note = Synthetic
  source 1..23: mol_type = other RNA
agaacggctacgaaaatccaacc

SEQ ID NO: 758 - RNA, 23 nt, synthetic construct
  misc_feature 1..23: note = Synthetic
  source 1..23: mol_type = other RNA
ctgaagtttcatttatgatacaa

SEQ ID NO: 759 - RNA, 23 nt, synthetic construct
  misc_feature 1..23: note = Synthetic
  source 1..23: mol_type = other RNA
tcatgccatctttgaccgaaacg

SEQ ID NO: 760 - RNA, 23 nt, synthetic construct
  misc_feature 1..23: note = Synthetic
  source 1..23: mol_type = other RNA
cagaacggctacgaaaatccaac

SEQ ID NO: 761 - RNA, 23 nt, synthetic construct
  misc_feature 1..23: note = Synthetic
  source 1..23: mol_type = other RNA
tttcttcgtgcctgttttatgtg

SEQ ID NO: 762 - RNA, 23 nt, synthetic construct
  misc_feature 1..23: note = Synthetic
  source 1..23: mol_type = other RNA
tcttgcccgagatcctgttaaac

SEQ ID NO: 763 - RNA, 23 nt, synthetic construct
  misc_feature 1..23: note = Synthetic
  source 1..23: mol_type = other RNA
ttcttcgtgcctgttttatgtgc

SEQ ID NO: 764 - RNA, 23 nt, synthetic construct
  misc_feature 1..23: note = Synthetic
  source 1..23: mol_type = other RNA
cagcgccatgtcccaaagtttac

SEQ ID NO: 765 - RNA, 23 nt, synthetic construct
  misc_feature 1..23: note = Synthetic
  source 1..23: mol_type = other RNA
ttgtcatagcgacagtgatcgtc

SEQ ID NO: 766 - RNA, 23 nt, synthetic construct
  misc_feature 1..23: note = Synthetic
  source 1..23: mol_type = other RNA
cggctacgaaaatccaacctaca

SEQ ID NO: 767 - RNA, 23 nt, synthetic construct
  misc_feature 1..23: note = Synthetic
  source 1..23: mol_type = other RNA
tcatagcgacagtgatcgtcatc

SEQ ID NO: 768 - RNA, 23 nt, synthetic construct
  misc_feature 1..23: note = Synthetic
  source 1..23: mol_type = other RNA
ctcttgcccgagatcctgttaaa

SEQ ID NO: 769 - RNA, 23 nt, synthetic construct
  misc_feature 1..23: note = Synthetic
  source 1..23: mol_type = other RNA
ctctcatgccatctttgaccgaa

SEQ ID NO: 770 - RNA, 23 nt, synthetic construct
  misc_feature 1..23: note = Synthetic
  source 1..23: mol_type = other RNA
gaacggctacgaaaatccaacct

SEQ ID NO: 771 - RNA, 23 nt, synthetic construct
  misc_feature 1..23: note = Synthetic
  source 1..23: mol_type = other RNA
atcatcaaaaattggtgttcttt

SEQ ID NO: 772 - RNA, 23 nt, synthetic construct
  misc_feature 1..23: note = Synthetic
  source 1..23: mol_type = other RNA
aaatccaacctacaagttctttg

SEQ ID NO: 773 - RNA, 23 nt, synthetic construct
  misc_feature 1..23: note = Synthetic
  source 1..23: mol_type = other RNA
atcgctttctacactgtattaca

SEQ ID NO: 774 - RNA, 23 nt, synthetic construct
  misc_feature 1..23: note = Synthetic
  source 1..23: mol_type = other RNA
aatccaacctacaagttctttga

SEQ ID NO: 775 - RNA, 23 nt, synthetic construct
  misc_feature 1..23: note = Synthetic
  source 1..23: mol_type = other RNA
tatctctctttacattttggtct

SEQ ID NO: 776 - RNA, 23 nt, synthetic construct
  misc_feature 1..23: note = Synthetic
  source 1..23: mol_type = other RNA
atctctctttacattttggtctc

SEQ ID NO: 777 - RNA, 23 nt, synthetic construct
  misc_feature 1..23: note = Synthetic
  source 1..23: mol_type = other RNA
gttttgtgtactgtaaagaattt

SEQ ID NO: 778 - RNA, 23 nt, synthetic construct
  misc_feature 1..23: note = Synthetic
  source 1..23: mol_type = other RNA
ttgtgtactgtaaagaatttagc

SEQ ID NO: 779 - RNA, 23 nt, synthetic construct
  misc_feature 1..23: note = Synthetic
  source 1..23: mol_type = other RNA
tgacccaattaagtcctacttta

SEQ ID NO: 780 - RNA, 23 nt, synthetic construct
  misc_feature 1..23: note = Synthetic
  source 1..23: mol_type = other RNA
agtcctactttacatatgcttta

SEQ ID NO: 781 - RNA, 23 nt, synthetic construct
  misc_feature 1..23: note = Synthetic
  source 1..23: mol_type = other RNA
gtcctactttacatatgctttaa

SEQ ID NO: 782 - RNA, 23 nt, synthetic construct
  misc_feature 1..23: note = Synthetic
  source 1..23: mol_type = other RNA
ctttctacactgtattacataaa

SEQ ID NO: 783 - RNA, 23 nt, synthetic construct
  misc_feature 1..23: note = Synthetic
  source 1..23: mol_type = other RNA
tttctacactgtattacataaat

SEQ ID NO: 784 - RNA, 23 nt, synthetic construct
  misc_feature 1..23: note = Synthetic
  source 1..23: mol_type = other RNA
ttcttttaagatgtgtcttcaat

SEQ ID NO: 785 - RNA, 23 nt, synthetic construct
  misc_feature 1..23: note = Synthetic
  source 1..23: mol_type = other RNA
agatgtgtcttcaatttgtataa

SEQ ID NO: 786 - RNA, 23 nt, synthetic construct
  misc_feature 1..23: note = Synthetic
  source 1..23: mol_type = other RNA
tcatcaaaaattggtgttctttg

SEQ ID NO: 787 - RNA, 23 nt, synthetic construct
  misc_feature 1..23: note = Synthetic
  source 1..23: mol_type = other RNA
gaaaatccaacctacaagttctt

SEQ ID NO: 788 - RNA, 23 nt, synthetic construct
  misc_feature 1..23: note = Synthetic
  source 1..23: mol_type = other RNA
gtgtactgtaaagaatttagctg

SEQ ID NO: 789 - RNA, 23 nt, synthetic construct
  misc_feature 1..23: note = Synthetic
  source 1..23: mol_type = other RNA
ctctcctgattatttatcacata

SEQ ID NO: 790 - RNA, 23 nt, synthetic construct
  misc_feature 1..23: note = Synthetic
  source 1..23: mol_type = other RNA
tagccagttgtatattattcttg

SEQ ID NO: 791 - RNA, 23 nt, synthetic construct
  misc_feature 1..23: note = Synthetic
  source 1..23: mol_type = other RNA
ccaattaagtcctactttacata

SEQ ID NO: 792 - RNA, 23 nt, synthetic construct
  misc_feature 1..23: note = Synthetic
  source 1..23: mol_type = other RNA
ctcttgcctaagtattcctttcc

SEQ ID NO: 793 - RNA, 23 nt, synthetic construct
  misc_feature 1..23: note = Synthetic
  source 1..23: mol_type = other RNA
gtattcctttcctgatcactatg

SEQ ID NO: 794 - RNA, 23 nt, synthetic construct
  misc_feature 1..23: note = Synthetic
  source 1..23: mol_type = other RNA
tcactatgcattttaaagttaaa

SEQ ID NO: 795 - RNA, 23 nt, synthetic construct
  misc_feature 1..23: note = Synthetic
  source 1..23: mol_type = other RNA
cctgttcattgtaagcactttta

SEQ ID NO: 796 - RNA, 23 nt, synthetic construct
  misc_feature 1..23: note = Synthetic
  source 1..23: mol_type = other RNA
tcaattaccaagaattctccaaa

SEQ ID NO: 797 - RNA, 23 nt, synthetic construct
  misc_feature 1..23: note = Synthetic
  source 1..23: mol_type = other RNA
aattaccaagaattctccaaaac

SEQ ID NO: 798 - RNA, 23 nt, synthetic construct
  misc_feature 1..23: note = Synthetic
  source 1..23: mol_type = other RNA
aatcattgcttatgacatgatcg

SEQ ID NO: 799 - RNA, 23 nt, synthetic construct
  misc_feature 1..23: note = Synthetic
  source 1..23: mol_type = other RNA
tcttttaagatgtgtcttcaatt

SEQ ID NO: 800 - RNA, 23 nt, synthetic construct
  misc_feature 1..23: note = Synthetic
  source 1..23: mol_type = other RNA
agatcctgttaaacttcctacaa

SEQ ID NO: 801 - RNA, 23 nt, synthetic construct
  misc_feature 1..23: note = Synthetic
  source 1..23: mol_type = other RNA
aaactattcagatgacgtcttgg

SEQ ID NO: 802 - RNA, 23 nt, synthetic construct
  misc_feature 1..23: note = Synthetic
  source 1..23: mol_type = other RNA
aagttcatcatcaaaaattggtg

SEQ ID NO: 803 - RNA, 23 nt, synthetic construct
  misc_feature 1..23: note = Synthetic
  source 1..23: mol_type = other RNA
tctatctctctttacattttggt

SEQ ID NO: 804 - RNA, 23 nt, synthetic construct
  misc_feature 1..23: note = Synthetic
  source 1..23: mol_type = other RNA
ctatctctctttacattttggtc

SEQ ID NO: 805 - RNA, 23 nt, synthetic construct
  misc_feature 1..23: note = Synthetic
  source 1..23: mol_type = other RNA
tttgtgtactgtaaagaatttag

SEQ ID NO: 806 - RNA, 23 nt, synthetic construct
  misc_feature 1..23: note = Synthetic
  source 1..23: mol_type = other RNA
tcctactttacatatgctttaag

SEQ ID NO: 807 - RNA, 23 nt, synthetic construct
  misc_feature 1..23: note = Synthetic
  source 1..23: mol_type = other RNA
cttgcctaagtattcctttcctg

SEQ ID NO: 808 - RNA, 23 nt, synthetic construct
  misc_feature 1..23: note = Synthetic
  source 1..23: mol_type = other RNA
ctaagtattcctttcctgatcac

SEQ ID NO: 809 - RNA, 23 nt, synthetic construct
  misc_feature 1..23: note = Synthetic
  source 1..23: mol_type = other RNA
aagtattcctttcctgatcacta

SEQ ID NO: 810 - RNA, 23 nt, synthetic construct
  misc_feature 1..23: note = Synthetic
  source 1..23: mol_type = other RNA
ctttcctgatcactatgcatttt

SEQ ID NO: 811 - RNA, 23 nt, synthetic construct
  misc_feature 1..23: note = Synthetic
  source 1..23: mol_type = other RNA
tcctgatcactatgcattttaaa

SEQ ID NO: 812 - RNA, 23 nt, synthetic construct
  misc_feature 1..23: note = Synthetic
  source 1..23: mol_type = other RNA
tccacgtatctttgggtctttga

SEQ ID NO: 813 - RNA, 23 nt, synthetic construct
  misc_feature 1..23: note = Synthetic
  source 1..23: mol_type = other RNA
tttgggtctttgataaagaaaag

SEQ ID NO: 814 - RNA, 23 nt, synthetic construct
  misc_feature 1..23: note = Synthetic
  source 1..23: mol_type = other RNA
cttcaattaccaagaattctcca

SEQ ID NO: 815 - RNA, 23 nt, synthetic construct
  misc_feature 1..23: note = Synthetic
  source 1..23: mol_type = other RNA
gatcgctttctacactgtattac

SEQ ID NO: 816 - RNA, 23 nt, synthetic construct
  misc_feature 1..23: note = Synthetic
  source 1..23: mol_type = other RNA
caattttctttaaccagtctgaa

SEQ ID NO: 817 - RNA, 23 nt, synthetic construct
  misc_feature 1..23: note = Synthetic
  source 1..23: mol_type = other RNA
ttctttaaccagtctgaagtttc

SEQ ID NO: 818 - RNA, 23 nt, synthetic construct
  misc_feature 1..23: note = Synthetic
  source 1..23: mol_type = other RNA
tttaagatgtgtcttcaatttgt

SEQ ID NO: 819 - RNA, 23 nt, synthetic construct
  misc_feature 1..23: note = Synthetic
  source 1..23: mol_type = other RNA
gagatcctgttaaacttcctaca

SEQ ID NO: 820 - RNA, 23 nt, synthetic construct
  misc_feature 1..23: note = Synthetic
  source 1..23: mol_type = other RNA
agctgcttcagaaagagcaaaac

SEQ ID NO: 821 - RNA, 23 nt, synthetic construct
  misc_feature 1..23: note = Synthetic
  source 1..23: mol_type = other RNA
ttcagaaagagcaaaactattca

SEQ ID NO: 822 - RNA, 23 nt, synthetic construct
  misc_feature 1..23: note = Synthetic
  source 1..23: mol_type = other RNA
gatatgaagttcatcatcaaaaa

SEQ ID NO: 823 - RNA, 23 nt, synthetic construct
  misc_feature 1..23: note = Synthetic
  source 1..23: mol_type = other RNA
ttcatcatcaaaaattggtgttc

SEQ ID NO: 824 - RNA, 23 nt, synthetic construct
  misc_feature 1..23: note = Synthetic
  source 1..23: mol_type = other RNA
catcaaaaattggtgttctttgc

SEQ ID NO: 825 - RNA, 23 nt, synthetic construct
  misc_feature 1..23: note = Synthetic
  source 1..23: mol_type = other RNA
cgaaaatccaacctacaagttct

SEQ ID NO: 826 - RNA, 23 nt, synthetic construct
  misc_feature 1..23: note = Synthetic
  source 1..23: mol_type = other RNA
atccaacctacaagttctttgag

SEQ ID NO: 827 - RNA, 23 nt, synthetic construct
  misc_feature 1..23: note = Synthetic
  source 1..23: mol_type = other RNA
ttactcattatcgccttttgaca

SEQ ID NO: 828 - RNA, 23 nt, synthetic construct
  misc_feature 1..23: note = Synthetic
  source 1..23: mol_type = other RNA
tactcattatcgccttttgacag

SEQ ID NO: 829 - RNA, 23 nt, synthetic construct
  misc_feature 1..23: note = Synthetic
  source 1..23: mol_type = other RNA
gctgtgctgtaacacaagtagat

SEQ ID NO: 830 - RNA, 23 nt, synthetic construct
  misc_feature 1..23: note = Synthetic
  source 1..23: mol_type = other RNA
ctgtgctgtaacacaagtagatg

SEQ ID NO: 831 - RNA, 23 nt, synthetic construct
  misc_feature 1..23: note = Synthetic
  source 1..23: mol_type = other RNA
tctctttacattttggtctctat

SEQ ID NO: 832 - RNA, 23 nt, synthetic construct
  misc_feature 1..23: note = Synthetic
  source 1..23: mol_type = other RNA
taatgggttttgtgtactgtaaa

SEQ ID NO: 833 - RNA, 23 nt, synthetic construct
  misc_feature 1..23: note = Synthetic
  source 1..23: mol_type = other RNA
ttttgtgtactgtaaagaattta

SEQ ID NO: 834 - RNA, 23 nt, synthetic construct
  misc_feature 1..23: note = Synthetic
  source 1..23: mol_type = other RNA
tagctgtatcaaactagtgcatg

SEQ ID NO: 835 - RNA, 23 nt, synthetic construct
  misc_feature 1..23: note = Synthetic
  source 1..23: mol_type = other RNA
aactagtgcatgaatagattctc

SEQ ID NO: 836 - RNA, 23 nt, synthetic construct
  misc_feature 1..23: note = Synthetic
  source 1..23: mol_type = other RNA
actagtgcatgaatagattctct

SEQ ID NO: 837 - RNA, 23 nt, synthetic construct
  misc_feature 1..23: note = Synthetic
  source 1..23: mol_type = other RNA
ttctctcctgattatttatcaca

SEQ ID NO: 838 - RNA, 23 nt, synthetic construct
  misc_feature 1..23: note = Synthetic
  source 1..23: mol_type = other RNA
ctcctgattatttatcacatagc

SEQ ID NO: 839 - RNA, 23 nt, synthetic construct
  misc_feature 1..23: note = Synthetic
  source 1..23: mol_type = other RNA
attaagtcctactttacatatgc

SEQ ID NO: 840 - RNA, 23 nt, synthetic construct
  misc_feature 1..23: note = Synthetic
  source 1..23: mol_type = other RNA
taagtcctactttacatatgctt

SEQ ID NO: 841 - RNA, 23 nt, synthetic construct
  misc_feature 1..23: note = Synthetic
  source 1..23: mol_type = other RNA
aagtcctactttacatatgcttt

SEQ ID NO: 842 - RNA, 23 nt, synthetic construct
  misc_feature 1..23: note = Synthetic
  source 1..23: mol_type = other RNA
gcttctcttgcctaagtattcct

SEQ ID NO: 843 - RNA, 23 nt, synthetic construct
  misc_feature 1..23: note = Synthetic
  source 1..23: mol_type = other RNA
ttctcttgcctaagtattccttt

SEQ ID NO: 844 - RNA, 23 nt, synthetic construct
  misc_feature 1..23: note = Synthetic
  source 1..23: mol_type = other RNA
agtattcctttcctgatcactat

SEQ ID NO: 845 - RNA, 23 nt, synthetic construct
  misc_feature 1..23: note = Synthetic
  source 1..23: mol_type = other RNA
cctttcctgatcactatgcattt

SEQ ID NO: 846 - RNA, 23 nt, synthetic construct
  misc_feature 1..23: note = Synthetic
  source 1..23: mol_type = other RNA
atcactatgcattttaaagttaa

SEQ ID NO: 847 - RNA, 23 nt, synthetic construct
  misc_feature 1..23: note = Synthetic
  source 1..23: mol_type = other RNA
gactgcattttactgtacagatt

SEQ ID NO: 848 - RNA, 23 nt, synthetic construct
  misc_feature 1..23: note = Synthetic
  source 1..23: mol_type = other RNA
gcttctgctatatttgtgatata

SEQ ID NO: 849 - RNA, 23 nt, synthetic construct
  misc_feature 1..23: note = Synthetic
  source 1..23: mol_type = other RNA
cttctgctatatttgtgatatag

SEQ ID NO: 850 - RNA, 23 nt, synthetic construct
  misc_feature 1..23: note = Synthetic
  source 1..23: mol_type = other RNA
ccacgtatctttgggtctttgat

SEQ ID NO: 851 - RNA, 23 nt, synthetic construct
  misc_feature 1..23: note = Synthetic
  source 1..23: mol_type = other RNA
tatctttgggtctttgataaaga

SEQ ID NO: 852 - RNA, 23 nt, synthetic construct
  misc_feature 1..23: note = Synthetic
  source 1..23: mol_type = other RNA
atctttgggtctttgataaagaa

SEQ ID NO: 853 - RNA, 23 nt, synthetic construct
  misc_feature 1..23: note = Synthetic
  source 1..23: mol_type = other RNA
ctttgggtctttgataaagaaaa

SEQ ID NO: 854 - RNA, 23 nt, synthetic construct
  misc_feature 1..23: note = Synthetic
  source 1..23: mol_type = other RNA
aaagaatccctgttcattgtaag

SEQ ID NO: 855 - RNA, 23 nt, synthetic construct
  misc_feature 1..23: note = Synthetic
  source 1..23: mol_type = other RNA
aagaatccctgttcattgtaagc

SEQ ID NO: 856 - RNA, 23 nt, synthetic construct
  misc_feature 1..23: note = Synthetic
  source 1..23: mol_type = other RNA
ctgttcattgtaagcacttttac

SEQ ID NO: 857 - RNA, 23 nt, synthetic construct
  misc_feature 1..23: note = Synthetic
  source 1..23: mol_type = other RNA
gcttatgacatgatcgctttcta

SEQ ID NO: 858 - RNA, 23 nt, synthetic construct
  misc_feature 1..23: note = Synthetic
  source 1..23: mol_type = other RNA
ttatgacatgatcgctttctaca

SEQ ID NO: 859 - RNA, 23 nt, synthetic construct
  misc_feature 1..23: note = Synthetic
  source 1..23: mol_type = other RNA
gacatgatcgctttctacactgt

SEQ ID NO: 860 - RNA, 23 nt, synthetic construct
  misc_feature 1..23: note = Synthetic
  source 1..23: mol_type = other RNA
cgctttctacactgtattacata

SEQ ID NO: 861 - RNA, 23 nt, synthetic construct
  misc_feature 1..23: note = Synthetic
  source 1..23: mol_type = other RNA
cagattcaattttctttaaccag

SEQ ID NO: 862 - RNA, 23 nt, synthetic construct
  misc_feature 1..23: note = Synthetic
  source 1..23: mol_type = other RNA
attttctttaaccagtctgaagt

SEQ ID NO: 863 - RNA, 23 nt, synthetic construct
  misc_feature 1..23: note = Synthetic
  source 1..23: mol_type = other RNA
cttttaagatgtgtcttcaattt

SEQ ID NO: 864 - RNA, 23 nt, synthetic construct
  misc_feature 1..23: note = Synthetic
  source 1..23: mol_type = other RNA
ttttaagatgtgtcttcaatttg

SEQ ID NO: 865 - RNA, 23 nt, synthetic construct
  misc_feature 1..23: note = Synthetic
  source 1..23: mol_type = other RNA
taagatgtgtcttcaatttgtat

SEQ ID NO: 866 - RNA, 23 nt, synthetic construct
  misc_feature 1..23: note = Synthetic
  source 1..23: mol_type = other RNA
tgtgtcttcaatttgtataaaat

SEQ ID NO: 867 - RNA, 23 nt, synthetic construct
  misc_feature 1..23: note = Synthetic
  source 1..23: mol_type = other RNA
gtcttcaatttgtataaaatggt

SEQ ID NO: 868 - RNA, 23 nt, synthetic construct
  misc_feature 1..23: note = Synthetic
  source 1..23: mol_type = other RNA
aaatggtgttttcatgtaaataa

SEQ ID NO: 869 - RNA, 23 nt, synthetic construct
  misc_feature 1..23: note = Synthetic
  source 1..23: mol_type = other RNA
ccttcttttaagatgtgtcttca

SEQ ID NO: 870 - RNA, 23 nt, synthetic construct
  misc_feature 1..23: note = Synthetic
  source 1..23: mol_type = other RNA
aatgtattctatctctctttaca

SEQ ID NO: 871 - RNA, 23 nt, synthetic construct
  misc_feature 1..23: note = Synthetic
  source 1..23: mol_type = other RNA
tggtctctatactacattattaa

SEQ ID NO: 872 - RNA, 23 nt, synthetic construct
  misc_feature 1..23: note = Synthetic
  source 1..23: mol_type = other RNA
ggtctctatactacattattaat

SEQ ID NO: 873 - RNA, 23 nt, synthetic construct
  misc_feature 1..23: note = Synthetic
  source 1..23: mol_type = other RNA
gtctctatactacattattaatg

SEQ ID NO: 874 - RNA, 23 nt, synthetic construct
  misc_feature 1..23: note = Synthetic
  source 1..23: mol_type = other RNA
gtcttcaattaccaagaattctc

SEQ ID NO: 875 - RNA, 23 nt, synthetic construct
  misc_feature 1..23: note = Synthetic
  source 1..23: mol_type = other RNA
atccacacatcagtaatgtattc

SEQ ID NO: 876 - RNA, 23 nt, synthetic construct
  misc_feature 1..23: note = Synthetic
  source 1..23: mol_type = other RNA
ttctatctctctttacattttgg

SEQ ID NO: 877 - RNA, 23 nt, synthetic construct
  misc_feature 1..23: note = Synthetic
  source 1..23: mol_type = other RNA
ttggtctctatactacattatta

SEQ ID NO: 878 - RNA, 23 nt, synthetic construct
  misc_feature 1..23: note = Synthetic
  source 1..23: mol_type = other RNA
tctctatactacattattaatgg

SEQ ID NO: 879 - RNA, 23 nt, synthetic construct
  misc_feature 1..23: note = Synthetic
  source 1..23: mol_type = other RNA
ctggtcttcaattaccaagaatt

SEQ ID NO: 880 - RNA, 23 nt, synthetic construct
  misc_feature 1..23: note = Synthetic
  source 1..23: mol_type = other RNA
ctcaggatatgaagttcatcatc

SEQ ID NO: 881 - RNA, 23 nt, synthetic construct
  misc_feature 1..23: note = Synthetic
  source 1..23: mol_type = other RNA
ccacacatcagtaatgtattcta

SEQ ID NO: 882 - RNA, 23 nt, synthetic construct
  misc_feature 1..23: note = Synthetic
  source 1..23: mol_type = other RNA
ctctatactacattattaatggg

SEQ ID NO: 883 - RNA, 23 nt, synthetic construct
  misc_feature 1..23: note = Synthetic
  source 1..23: mol_type = other RNA
aacccgttttatgatttactcat

SEQ ID NO: 884 - RNA, 23 nt, synthetic construct
  misc_feature 1..23: note = Synthetic
  source 1..23: mol_type = other RNA
ttttccatgactgcattttactg

SEQ ID NO: 885 - RNA, 23 nt, synthetic construct
  misc_feature 1..23: note = Synthetic
  source 1..23: mol_type = other RNA
ggtcttcaattaccaagaattct

SEQ ID NO: 886 - RNA, 23 nt, synthetic construct
  misc_feature 1..23: note = Synthetic
  source 1..23: mol_type = other RNA
gtctgaagtttcatttatgatac

SEQ ID NO: 887 - RNA, 21 nt, synthetic construct
  misc_feature 1..21: note = Synthetic
  source 1..21: mol_type = other RNA
gcgccatgtcccaaagtttat

SEQ ID NO: 888 - RNA, 21 nt, synthetic construct
  misc_feature 1..21: note = Synthetic
  source 1..21: mol_type = other RNA
cttgcccgagatcctgttaaa

SEQ ID NO: 889 - RNA, 21 nt, synthetic construct
  misc_feature 1..21: note = Synthetic
  source 1..21: mol_type = other RNA
ttgcccgagatcctgttaaat

SEQ ID NO: 890 - RNA, 21 nt, synthetic construct
  misc_feature 1..21: note = Synthetic
  source 1..21: mol_type = other RNA
tgcccgagatcctgttaaact

SEQ ID NO: 891 - RNA, 21 nt, synthetic construct
  misc_feature 1..21: note = Synthetic
  source 1..21: mol_type = other RNA
gatcctgttaaacttcctaca

SEQ ID NO: 892 - RNA, 21 nt, synthetic construct
  misc_feature 1..21: note = Synthetic
  source 1..21: mol_type = other RNA
atcctgttaaacttcctacaa

SEQ ID NO: 893 - RNA, 21 nt, synthetic construct
  misc_feature 1..21: note = Synthetic
  source 1..21: mol_type = other RNA
ctgcttcagaaagagcaaaat

SEQ ID NO: 894 - RNA, 21 nt, synthetic construct
  misc_feature 1..21: note = Synthetic
  source 1..21: mol_type = other RNA
cagaaagagcaaaactattca

SEQ ID NO: 895 - RNA, 21 nt, synthetic construct
  misc_feature 1..21: note = Synthetic
  source 1..21: mol_type = other RNA
gagcaaaactattcagatgat

SEQ ID NO: 896 - RNA, 21 nt, synthetic construct
  misc_feature 1..21: note = Synthetic
  source 1..21: mol_type = other RNA
aaaactattcagatgacgtct

SEQ ID NO: 897 - RNA, 21 nt, synthetic construct
  misc_feature 1..21: note = Synthetic
  source 1..21: mol_type = other RNA
aaactattcagatgacgtctt

SEQ ID NO: 898 - RNA, 21 nt, synthetic construct
  misc_feature 1..21: note = Synthetic
  source 1..21: mol_type = other RNA
actattcagatgacgtcttgt

SEQ ID NO: 899 - RNA, 21 nt, synthetic construct
  misc_feature 1..21: note = Synthetic
  source 1..21: mol_type = other RNA
ttcagatgacgtcttggccaa

SEQ ID NO: 900 - RNA, 21 nt, synthetic construct
  misc_feature 1..21: note = Synthetic
  source 1..21: mol_type = other RNA
ggccaacatgattagtgaact

SEQ ID NO: 901 - RNA, 21 nt, synthetic construct
  misc_feature 1..21: note = Synthetic
  source 1..21: mol_type = other RNA
ccaacatgattagtgaaccaa

SEQ ID NO: 902 - RNA, 21 nt, synthetic construct
  misc_feature 1..21: note = Synthetic
  source 1..21: mol_type = other RNA
atgattagtgaaccaaggatt

SEQ ID NO: 903 - RNA, 21 nt, synthetic construct
  misc_feature 1..21: note = Synthetic
  source 1..21: mol_type = other RNA
attagtgaaccaaggatcagt

SEQ ID NO: 904 - RNA, 21 nt, synthetic construct
  misc_feature 1..21: note = Synthetic
  source 1..21: mol_type = other RNA
ttagtgaaccaaggatcagtt

SEQ ID NO: 905 - RNA, 21 nt, synthetic construct
  misc_feature 1..21: note = Synthetic
  source 1..21: mol_type = other RNA
agtgaaccaaggatcagttat

SEQ ID NO: 906 - RNA, 21 nt, synthetic construct
  misc_feature 1..21: note = Synthetic
  source 1..21: mol_type = other RNA
tgaaccaaggatcagttacgt

SEQ ID NO: 907 - RNA, 21 nt, synthetic construct
  misc_feature 1..21: note = Synthetic
  source 1..21: mol_type = other RNA
gaaccaaggatcagttacgga

SEQ ID NO: 908 - RNA, 21 nt, synthetic construct
  misc_feature 1..21: note = Synthetic
  source 1..21: mol_type = other RNA
aaccaaggatcagttacggaa

SEQ ID NO: 909 - RNA, 21 nt, synthetic construct
  misc_feature 1..21: note = Synthetic
  source 1..21: mol_type = other RNA
caaggatcagttacggaaact

SEQ ID NO: 910 - RNA, 21 nt, synthetic construct
  misc_feature 1..21: note = Synthetic
  source 1..21: mol_type = other RNA
aaggatcagttacggaaacga

SEQ ID NO: 911 - RNA, 21 nt, synthetic construct
  misc_feature 1..21: note = Synthetic
  source 1..21: mol_type = other RNA
ggatcagttacggaaacgatt

SEQ ID NO: 912 - RNA, 21 nt, synthetic construct
  misc_feature 1..21: note = Synthetic
  source 1..21: mol_type = other RNA
gatcagttacggaaacgatgt

SEQ ID NO: 913 - RNA, 21 nt, synthetic construct
  misc_feature 1..21: note = Synthetic
  source 1..21: mol_type = other RNA
atcagttacggaaacgatgct

SEQ ID NO: 914 - RNA, 21 nt, synthetic construct
  misc_feature 1..21: note = Synthetic
  source 1..21: mol_type = other RNA
tcagttacggaaacgatgctt

SEQ ID NO: 915 - RNA, 21 nt, synthetic construct
  misc_feature 1..21: note = Synthetic
  source 1..21: mol_type = other RNA
cagttacggaaacgatgctct

SEQ ID NO: 916 - RNA, 21 nt, synthetic construct
  misc_feature 1..21: note = Synthetic
  source 1..21: mol_type = other RNA
gttacggaaacgatgctctca

SEQ ID NO: 917 - RNA, 21 nt, synthetic construct
  misc_feature 1..21: note = Synthetic
  source 1..21: mol_type = other RNA
tacggaaacgatgctctcatt

SEQ ID NO: 918 - RNA, 21 nt, synthetic construct
  misc_feature 1..21: note = Synthetic
  source 1..21: mol_type = other RNA
ctcatgccatctttgaccgaa

SEQ ID NO: 919 - RNA, 21 nt, synthetic construct
  misc_feature 1..21: note = Synthetic
  source 1..21: mol_type = other RNA
tcatgccatctttgaccgaaa

SEQ ID NO: 920 - RNA, 21 nt, synthetic construct
  misc_feature 1..21: note = Synthetic
  source 1..21: mol_type = other RNA
catgccatctttgaccgaaat

SEQ ID NO: 921 - RNA, 21 nt, synthetic construct
  misc_feature 1..21: note = Synthetic
  source 1..21: mol_type = other RNA
atgccatctttgaccgaaact

SEQ ID NO: 922 - RNA, 21 nt, synthetic construct
  misc_feature 1..21: note = Synthetic
  source 1..21: mol_type = other RNA
gccatctttgaccgaaacgaa

SEQ ID NO: 923 - RNA, 21 nt, synthetic construct
  misc_feature 1..21: note = Synthetic
  source 1..21: mol_type = other RNA
ccatctttgaccgaaacgaaa

SEQ ID NO: 924 - RNA, 21 nt, synthetic construct
  misc_feature 1..21: note = Synthetic
  source 1..21: mol_type = other RNA
tctttgaccgaaacgaaaact

SEQ ID NO: 925 - RNA, 21 nt, synthetic construct
  misc_feature 1..21: note = Synthetic
  source 1..21: mol_type = other RNA
cttcccgtgaatggagagttt

SEQ ID NO: 926 - RNA, 21 nt, synthetic construct
  misc_feature 1..21: note = Synthetic
  source 1..21: mol_type = other RNA
caacacagaaaacgaagttga

SEQ ID NO: 927 - RNA, 21 nt, synthetic construct
  misc_feature 1..21: note = Synthetic
  source 1..21: mol_type = other RNA
aggttctgggttgacaaatat

SEQ ID NO: 928 - RNA, 21 nt, synthetic construct
  misc_feature 1..21: note = Synthetic
  source 1..21: mol_type = other RNA
gttctgggttgacaaatatca

SEQ ID NO: 929 - RNA, 21 nt, synthetic construct
  misc_feature 1..21: note = Synthetic
  source 1..21: mol_type = other RNA
ctgggttgacaaatatcaaga

SEQ ID NO: 930 - RNA, 21 nt, synthetic construct
  misc_feature 1..21: note = Synthetic
  source 1..21: mol_type = other RNA
tgggttgacaaatatcaagat

SEQ ID NO: 931 - RNA, 21 nt, synthetic construct
  misc_feature 1..21: note = Synthetic
  source 1..21: mol_type = other RNA
tggatgcagaattccgacatt

SEQ ID NO: 932 - RNA, 21 nt, synthetic construct
  misc_feature 1..21: note = Synthetic
  source 1..21: mol_type = other RNA
gatgcagaattccgacatgat

SEQ ID NO: 933 - RNA, 21 nt, synthetic construct
  misc_feature 1..21: note = Synthetic
  source 1..21: mol_type = other RNA
caggatatgaagttcatcatt

SEQ ID NO: 934 - RNA, 21 nt, synthetic construct
  misc_feature 1..21: note = Synthetic
  source 1..21: mol_type = other RNA
tatgaagttcatcatcaaaaa

SEQ ID NO: 935 - RNA, 21 nt, synthetic construct
  misc_feature 1..21: note = Synthetic
  source 1..21: mol_type = other RNA
gttcatcatcaaaaattggtt

SEQ ID NO: 936 - RNA, 21 nt, synthetic construct
  misc_feature 1..21: note = Synthetic
  source 1..21: mol_type = other RNA
catcatcaaaaattggtgttt

SEQ ID NO: 937 - RNA, 21 nt, synthetic construct
  misc_feature 1..21: note = Synthetic
  source 1..21: mol_type = other RNA
catcaaaaattggtgttcttt

SEQ ID NO: 938 - RNA, 21 nt, synthetic construct
  misc_feature 1..21: note = Synthetic
  source 1..21: mol_type = other RNA
atcaaaaattggtgttctttg

SEQ ID NO: 939 - RNA, 21 nt, synthetic construct
  misc_feature 1..21: note = Synthetic
  source 1..21: mol_type = other RNA
tcaaaaattggtgttctttgt

SEQ ID NO: 940 - RNA, 21 nt, synthetic construct
  misc_feature 1..21: note = Synthetic
  source 1..21: mol_type = other RNA
agaagatgtgggttcaaacaa

SEQ ID NO: 941 - RNA, 21 nt, synthetic construct
  misc_feature 1..21: note = Synthetic
  source 1..21: mol_type = other RNA
aagatgtgggttcaaacaaat

SEQ ID NO: 942 - RNA, 21 nt, synthetic construct
  misc_feature 1..21: note = Synthetic
  source 1..21: mol_type = other RNA
tgggttcaaacaaaggtgcaa

SEQ ID NO: 943 - RNA, 21 nt, synthetic construct
  misc_feature 1..21: note = Synthetic
  source 1..21: mol_type = other RNA
ggttcaaacaaaggtgcaatt

SEQ ID NO: 944 - RNA, 21 nt, synthetic construct
  misc_feature 1..21: note = Synthetic
  source 1..21: mol_type = other RNA
gtcatagcgacagtgatcgtt

SEQ ID NO: 945 - RNA, 21 nt, synthetic construct
  misc_feature 1..21: note = Synthetic
  source 1..21: mol_type = other RNA
atagcgacagtgatcgtcatt

SEQ ID NO: 946 - RNA, 21 nt, synthetic construct
  misc_feature 1..21: note = Synthetic
  source 1..21: mol_type = other RNA
cagtgatcgtcatcaccttgt

SEQ ID NO: 947 - RNA, 21 nt, synthetic construct
  misc_feature 1..21: note = Synthetic
  source 1..21: mol_type = other RNA
ctgaagaagaaacagtacaca

SEQ ID NO: 948 - RNA, 21 nt, synthetic construct
  misc_feature 1..21: note = Synthetic
  source 1..21: mol_type = other RNA
cagtacacatccattcatcat

SEQ ID NO: 949 - RNA, 21 nt, synthetic construct
  misc_feature 1..21: note = Synthetic
  source 1..21: mol_type = other RNA
gtccaagatgcagcagaacgt

SEQ ID NO: 950 - RNA, 21 nt, synthetic construct
  misc_feature 1..21: note = Synthetic
  source 1..21: mol_type = other RNA
gaacggctacgaaaatccaat

SEQ ID NO: 951 - RNA, 21 nt, synthetic construct
  misc_feature 1..21: note = Synthetic
  source 1..21: mol_type = other RNA
aacggctacgaaaatccaact

SEQ ID NO: 952 - RNA, 21 nt, synthetic construct
  misc_feature 1..21: note = Synthetic
  source 1..21: mol_type = other RNA
acggctacgaaaatccaacct

SEQ ID NO: 953 - RNA, 21 nt, synthetic construct
  misc_feature 1..21: note = Synthetic
  source 1..21: mol_type = other RNA
ggctacgaaaatccaacctat

SEQ ID NO: 954 - RNA, 21 nt, synthetic construct
  misc_feature 1..21: note = Synthetic
  source 1..21: mol_type = other RNA
gctacgaaaatccaacctaca

SEQ ID NO: 955 - RNA, 21 nt, synthetic construct
  misc_feature 1..21: note = Synthetic
  source 1..21: mol_type = other RNA
ctacgaaaatccaacctacaa

SEQ ID NO: 956 - RNA, 21 nt, synthetic construct
  misc_feature 1..21: note = Synthetic
  source 1..21: mol_type = other RNA
tacgaaaatccaacctacaat

SEQ ID NO: 957 - RNA, 21 nt, synthetic construct
  misc_feature 1..21: note = Synthetic
  source 1..21: mol_type = other RNA
acgaaaatccaacctacaagt

SEQ ID NO: 958 - RNA, 21 nt, synthetic construct
  misc_feature 1..21: note = Synthetic
  source 1..21: mol_type = other RNA
aaaatccaacctacaagttct

SEQ ID NO: 959 - RNA, 21 nt, synthetic construct
  misc_feature 1..21: note = Synthetic
  source 1..21: mol_type = other RNA
aaatccaacctacaagttctt

SEQ ID NO: 960 - RNA, 21 nt, synthetic construct
  misc_feature 1..21: note = Synthetic
  source 1..21: mol_type = other RNA
atccaacctacaagttctttg

SEQ ID NO: 961 - RNA, 21 nt, synthetic construct
  misc_feature 1..21: note = Synthetic
  source 1..21: mol_type = other RNA
tccaacctacaagttctttga

SEQ ID NO: 962 - RNA, 21 nt, synthetic construct
  misc_feature 1..21: note = Synthetic
  source 1..21: mol_type = other RNA
ccaacctacaagttctttgat

SEQ ID NO: 963 - RNA, 21 nt, synthetic construct
  misc_feature 1..21: note = Synthetic
  source 1..21: mol_type = other RNA
cctctgaagttggacagcaaa

SEQ ID NO: 964 - RNA, 21 nt, synthetic construct
  misc_feature 1..21: note = Synthetic
  source 1..21: mol_type = other RNA
aagttggacagcaaaaccatt

SEQ ID NO: 965 - RNA, 21 nt, synthetic construct
  misc_feature 1..21: note = Synthetic
  source 1..21: mol_type = other RNA
agttggacagcaaaaccattt

SEQ ID NO: 966 - RNA, 21 nt, synthetic construct
  misc_feature 1..21: note = Synthetic
  source 1..21: mol_type = other RNA
ttggacagcaaaaccattgct

SEQ ID NO: 967 - RNA, 21 nt, synthetic construct
  misc_feature 1..21: note = Synthetic
  source 1..21: mol_type = other RNA
gcaaaaccattgcttcactat

SEQ ID NO: 968 - RNA, 21 nt, synthetic construct
  misc_feature 1..21: note = Synthetic
  source 1..21: mol_type = other RNA
aaaccattgcttcactaccca

SEQ ID NO: 969 - RNA, 21 nt, synthetic construct
  misc_feature 1..21: note = Synthetic
  source 1..21: mol_type = other RNA
tacccatcggtgtccatttat

SEQ ID NO: 970 - RNA, 21 nt, synthetic construct
  misc_feature 1..21: note = Synthetic
  source 1..21: mol_type = other RNA
acccatcggtgtccatttata

SEQ ID NO: 971 - RNA, 21 nt, synthetic construct
  misc_feature 1..21: note = Synthetic
  source 1..21: mol_type = other RNA
cccatcggtgtccatttatat

SEQ ID NO: 972 - RNA, 21 nt, synthetic construct
  misc_feature 1..21: note = Synthetic
  source 1..21: mol_type = other RNA
ccatcggtgtccatttataga

SEQ ID NO: 973 - RNA, 21 nt, synthetic construct
  misc_feature 1..21: note = Synthetic
  source 1..21: mol_type = other RNA
atcggtgtccatttatagaat

SEQ ID NO: 974 - RNA, 21 nt, synthetic construct
  misc_feature 1..21: note = Synthetic
  source 1..21: mol_type = other RNA
tcggtgtccatttatagaata

SEQ ID NO: 975 - RNA, 21 nt, synthetic construct
  misc_feature 1..21: note = Synthetic
  source 1..21: mol_type = other RNA
acccgttttatgatttactca

SEQ ID NO: 976 - RNA, 21 nt, synthetic construct
  misc_feature 1..21: note = Synthetic
  source 1..21: mol_type = other RNA
cccgttttatgatttactcat

SEQ ID NO: 977 - RNA, 21 nt, synthetic construct
  misc_feature 1..21: note = Synthetic
  source 1..21: mol_type = other RNA
ttatgatttactcattatcgt

SEQ ID NO: 978 - RNA, 21 nt, synthetic construct
  misc_feature 1..21: note = Synthetic
  source 1..21: mol_type = other RNA
atgatttactcattatcgcct

SEQ ID NO: 979 - RNA, 21 nt, synthetic construct
  misc_feature 1..21: note = Synthetic
  source 1..21: mol_type = other RNA
tgatttactcattatcgcctt

SEQ ID NO: 980 - RNA, 21 nt, synthetic construct
  misc_feature 1..21: note = Synthetic
  source 1..21: mol_type = other RNA
gatttactcattatcgccttt

SEQ ID NO: 981 - RNA, 21 nt, synthetic construct
  misc_feature 1..21: note = Synthetic
  source 1..21: mol_type = other RNA
atttactcattatcgcctttt

SEQ ID NO: 982 - RNA, 21 nt, synthetic construct
  misc_feature 1..21: note = Synthetic
  source 1..21: mol_type = other RNA
tttactcattatcgccttttg

SEQ ID NO: 983 - RNA, 21 nt, synthetic construct
  misc_feature 1..21: note = Synthetic
  source 1..21: mol_type = other RNA
tactcattatcgccttttgat

SEQ ID NO: 984 - RNA, 21 nt, synthetic construct
  misc_feature 1..21: note = Synthetic
  source 1..21: mol_type = other RNA
actcattatcgccttttgaca

SEQ ID NO: 985 - RNA, 21 nt, synthetic construct
  misc_feature 1..21: note = Synthetic
  source 1..21: mol_type = other RNA
ctcattatcgccttttgacat

SEQ ID NO: 986 - RNA, 21 nt, synthetic construct
  misc_feature 1..21: note = Synthetic
  source 1..21: mol_type = other RNA
ttatcgccttttgacagctgt

SEQ ID NO: 987 - RNA, 21 nt, synthetic construct
  misc_feature 1..21: note = Synthetic
  source 1..21: mol_type = other RNA
atcgccttttgacagctgtgt

SEQ ID NO: 988 - RNA, 21 nt, synthetic construct
  misc_feature 1..21: note = Synthetic
  source 1..21: mol_type = other RNA
ttttgacagctgtgctgtaat

SEQ ID NO: 989 - RNA, 21 nt, synthetic construct
  misc_feature 1..21: note = Synthetic
  source 1..21: mol_type = other RNA
ttgacagctgtgctgtaacat

SEQ ID NO: 990 - RNA, 21 nt, synthetic construct
  misc_feature 1..21: note = Synthetic
  source 1..21: mol_type = other RNA
acagctgtgctgtaacacaat

SEQ ID NO: 991 - RNA, 21 nt, synthetic construct
  misc_feature 1..21: note = Synthetic
  source 1..21: mol_type = other RNA
agctgtgctgtaacacaagta

SEQ ID NO: 992 - RNA, 21 nt, synthetic construct
  misc_feature 1..21: note = Synthetic
  source 1..21: mol_type = other RNA
tgtgctgtaacacaagtagat

SEQ ID NO: 993 - RNA, 21 nt, synthetic construct
  misc_feature 1..21: note = Synthetic
  source 1..21: mol_type = other RNA
gtgctgtaacacaagtagatt

SEQ ID NO: 994 - RNA, 21 nt, synthetic construct
  misc_feature 1..21: note = Synthetic
  source 1..21: mol_type = other RNA
gctgtaacacaagtagatgct

SEQ ID NO: 995 - RNA, 21 nt, synthetic construct
  misc_feature 1..21: note = Synthetic
  source 1..21: mol_type = other RNA
acacaagtagatgcctgaact

SEQ ID NO: 996 - RNA, 21 nt, synthetic construct
  misc_feature 1..21: note = Synthetic
  source 1..21: mol_type = other RNA
aagtagatgcctgaacttgaa

SEQ ID NO: 997 - RNA, 21 nt, synthetic construct
  misc_feature 1..21: note = Synthetic
  source 1..21: mol_type = other RNA
gtagatgcctgaacttgaatt

SEQ ID NO: 998 - RNA, 21 nt, synthetic construct
  misc_feature 1..21: note = Synthetic
  source 1..21: mol_type = other RNA
tgcctgaacttgaattaatct

SEQ ID NO: 999 - RNA, 21 nt, synthetic construct
  misc_feature 1..21: note = Synthetic
  source 1..21: mol_type = other RNA
cctgaacttgaattaatccat

SEQ ID NO: 1000 - RNA, 21 nt, synthetic construct
  misc_feature 1..21: note = Synthetic
  source 1..21: mol_type = other RNA
ctgaacttgaattaatccaca

SEQ ID NO: 1001 - RNA, 21 nt, synthetic construct
  misc_feature 1..21: note = Synthetic
  source 1..21: mol_type = other RNA
atccacacatcagtaatgtat

SEQ ID NO: 1002 - RNA, 21 nt, synthetic construct
  misc_feature 1..21: note = Synthetic
  source 1..21: mol_type = other RNA
tccacacatcagtaatgtatt

SEQ ID NO: 1003 - RNA, 21 nt, synthetic construct
  misc_feature 1..21: note = Synthetic
  source 1..21: mol_type = other RNA
ccacacatcagtaatgtattt

SEQ ID NO: 1004 - RNA, 21 nt, synthetic construct
  misc_feature 1..21: note = Synthetic
  source 1..21: mol_type = other RNA
cacacatcagtaatgtattct

SEQ ID NO: 1005 - RNA, 21 nt, synthetic construct
  misc_feature 1..21: note = Synthetic
  source 1..21: mol_type = other RNA
acacatcagtaatgtattcta

SEQ ID NO: 1006 - RNA, 21 nt, synthetic construct
  misc_feature 1..21: note = Synthetic
  source 1..21: mol_type = other RNA
tgtattctatctctctttaca

SEQ ID NO: 1007 - RNA, 21 nt, synthetic construct
  misc_feature 1..21: note = Synthetic
  source 1..21: mol_type = other RNA
ctatctctctttacattttgt

SEQ ID NO: 1008 - RNA, 21 nt, synthetic construct
  misc_feature 1..21: note = Synthetic
  source 1..21: mol_type = other RNA
tatctctctttacattttggt

SEQ ID NO: 1009 - RNA, 21 nt, synthetic construct
  misc_feature 1..21: note = Synthetic
  source 1..21: mol_type = other RNA
atctctctttacattttggtt

SEQ ID NO: 1010 - RNA, 21 nt, synthetic construct
  misc_feature 1..21: note = Synthetic
  source 1..21: mol_type = other RNA
tctctctttacattttggtct

SEQ ID NO: 1011 - RNA, 21 nt, synthetic construct
  misc_feature 1..21: note = Synthetic
  source 1..21: mol_type = other RNA
ctctctttacattttggtctt

SEQ ID NO: 1012 - RNA, 21 nt, synthetic construct
  misc_feature 1..21: note = Synthetic
  source 1..21: mol_type = other RNA
tctttacattttggtctctat

SEQ ID NO: 1013 - RNA, 21 nt, synthetic construct
  misc_feature 1..21: note = Synthetic
  source 1..21: mol_type = other RNA
tggtctctatactacattatt

SEQ ID NO: 1014 - RNA, 21 nt, synthetic construct
  misc_feature 1..21: note = Synthetic
  source 1..21: mol_type = other RNA
ggtctctatactacattatta

SEQ ID NO: 1015 - RNA, 21 nt, synthetic construct
  misc_feature 1..21: note = Synthetic
  source 1..21: mol_type = other RNA
gtctctatactacattattaa

SEQ ID NO: 1016 - RNA, 21 nt, synthetic construct
  misc_feature 1..21: note = Synthetic
  source 1..21: mol_type = other RNA
tctctatactacattattaat

SEQ ID NO: 1017 - RNA, 21 nt, synthetic construct
  misc_feature 1..21: note = Synthetic
  source 1..21: mol_type = other RNA
ctctatactacattattaatt

SEQ ID NO: 1018 - RNA, 21 nt, synthetic construct
  misc_feature 1..21: note = Synthetic
  source 1..21: mol_type = other RNA
tctatactacattattaatgt

SEQ ID NO: 1019 - RNA, 21 nt, synthetic construct
  misc_feature 1..21: note = Synthetic
  source 1..21: mol_type = other RNA
ctatactacattattaatggt

SEQ ID NO: 1020 - RNA, 21 nt, synthetic construct
  misc_feature 1..21: note = Synthetic
  source 1..21: mol_type = other RNA
atgggttttgtgtactgtaaa

SEQ ID NO: 1021 - RNA, 21 nt, synthetic construct
  misc_feature 1..21: note = Synthetic
  source 1..21: mol_type = other RNA
tttgtgtactgtaaagaattt

SEQ ID NO: 1022 - RNA, 21 nt, synthetic construct
  misc_feature 1..21: note = Synthetic
  source 1..21: mol_type = other RNA
ttgtgtactgtaaagaattta

SEQ ID NO: 1023 - RNA, 21 nt, synthetic construct
  misc_feature 1..21: note = Synthetic
  source 1..21: mol_type = other RNA
tgtgtactgtaaagaatttat

SEQ ID NO: 1024 - RNA, 21 nt, synthetic construct
  misc_feature 1..21: note = Synthetic
  source 1..21: mol_type = other RNA
gtgtactgtaaagaatttagt

SEQ ID NO: 1025 - RNA, 21 nt, synthetic construct
  misc_feature 1..21: note = Synthetic
  source 1..21: mol_type = other RNA
gtactgtaaagaatttagctt

SEQ ID NO: 1026 - RNA, 21 nt, synthetic construct
  misc_feature 1..21: note = Synthetic
  source 1..21: mol_type = other RNA
atttagctgtatcaaactagt

SEQ ID NO: 1027 - RNA, 21 nt, synthetic construct
  misc_feature 1..21: note = Synthetic
  source 1..21: mol_type = other RNA
tttagctgtatcaaactagtt

SEQ ID NO: 1028 - RNA, 21 nt, synthetic construct
  misc_feature 1..21: note = Synthetic
  source 1..21: mol_type = other RNA
gctgtatcaaactagtgcatt

SEQ ID NO: 1029 - RNA, 21 nt, synthetic construct
  misc_feature 1..21: note = Synthetic
  source 1..21: mol_type = other RNA
ctagtgcatgaatagattctt

SEQ ID NO: 1030 - RNA, 21 nt, synthetic construct
  misc_feature 1..21: note = Synthetic
  source 1..21: mol_type = other RNA
tagtgcatgaatagattctct

SEQ ID NO: 1031 - RNA, 21 nt, synthetic construct
  misc_feature 1..21: note = Synthetic
  source 1..21: mol_type = other RNA
gaatagattctctcctgatta

SEQ ID NO: 1032 - RNA, 21 nt, synthetic construct
  misc_feature 1..21: note = Synthetic
  source 1..21: mol_type = other RNA
ctctcctgattatttatcaca

SEQ ID NO: 1033 - RNA, 21 nt, synthetic construct
  misc_feature 1..21: note = Synthetic
  source 1..21: mol_type = other RNA
tctcctgattatttatcacat

SEQ ID NO: 1034 - RNA, 21 nt, synthetic construct
  misc_feature 1..21: note = Synthetic
  source 1..21: mol_type = other RNA
ctcctgattatttatcacata

SEQ ID NO: 1035 - RNA, 21 nt, synthetic construct
  misc_feature 1..21: note = Synthetic
  source 1..21: mol_type = other RNA
tcctgattatttatcacatat

SEQ ID NO: 1036 - RNA, 21 nt, synthetic construct
  misc_feature 1..21: note = Synthetic
  source 1..21: mol_type = other RNA
cctgattatttatcacatagt

SEQ ID NO: 1037 - RNA, 21 nt, synthetic construct
  misc_feature 1..21: note = Synthetic
  source 1..21: mol_type = other RNA
gccagttgtatattattcttt

SEQ ID NO: 1038 - RNA, 21 nt, synthetic construct
  misc_feature 1..21: note = Synthetic
  source 1..21: mol_type = other RNA
ttgtatattattcttgtggtt

SEQ ID NO: 1039 - RNA, 21 nt, synthetic construct
  misc_feature 1..21: note = Synthetic
  source 1..21: mol_type = other RNA
tcttgtggtttgtgacccaat

SEQ ID NO: 1040 - RNA, 21 nt, synthetic construct
  misc_feature 1..21: note = Synthetic
  source 1..21: mol_type = other RNA
cttgtggtttgtgacccaatt

SEQ ID NO: 1041 - RNA, 21 nt, synthetic construct
  misc_feature 1..21: note = Synthetic
  source 1..21: mol_type = other RNA
ttgtggtttgtgacccaatta

SEQ ID NO: 1042 - RNA, 21 nt, synthetic construct
  misc_feature 1..21: note = Synthetic
  source 1..21: mol_type = other RNA
tgtggtttgtgacccaattaa

SEQ ID NO: 1043 - RNA, 21 nt, synthetic construct
  misc_feature 1..21: note = Synthetic
  source 1..21: mol_type = other RNA
gtttgtgacccaattaagtct

SEQ ID NO: 1044 - RNA, 21 nt, synthetic construct
  misc_feature 1..21: note = Synthetic
  source 1..21: mol_type = other RNA
tttgtgacccaattaagtcct

SEQ ID NO: 1045 - RNA, 21 nt, synthetic construct
  misc_feature 1..21: note = Synthetic
  source 1..21: mol_type = other RNA
ttgtgacccaattaagtccta

SEQ ID NO: 1046 - RNA, 21 nt, synthetic construct
  misc_feature 1..21: note = Synthetic
  source 1..21: mol_type = other RNA
tgtgacccaattaagtcctat

SEQ ID NO: 1047 - RNA, 21 nt, synthetic construct
  misc_feature 1..21: note = Synthetic
  source 1..21: mol_type = other RNA
gtgacccaattaagtcctact

SEQ ID NO: 1048 - RNA, 21 nt, synthetic construct
  misc_feature 1..21: note = Synthetic
  source 1..21: mol_type = other RNA
gacccaattaagtcctacttt

SEQ ID NO: 1049 - RNA, 21 nt, synthetic construct
  misc_feature 1..21: note = Synthetic
  source 1..21: mol_type = other RNA
acccaattaagtcctacttta

SEQ ID NO: 1050 - RNA, 21 nt, synthetic construct
  misc_feature 1..21: note = Synthetic
  source 1..21: mol_type = other RNA
cccaattaagtcctactttat

SEQ ID NO: 1051 - RNA, 21 nt, synthetic construct
  misc_feature 1..21: note = Synthetic
  source 1..21: mol_type = other RNA
aattaagtcctactttacata

SEQ ID NO: 1052 - RNA, 21 nt, synthetic construct
  misc_feature 1..21: note = Synthetic
  source 1..21: mol_type = other RNA
taagtcctactttacatatgt

SEQ ID NO: 1053 - RNA, 21 nt, synthetic construct
  misc_feature 1..21: note = Synthetic
  source 1..21: mol_type = other RNA
agtcctactttacatatgctt

SEQ ID NO: 1054 - RNA, 21 nt, synthetic construct
  misc_feature 1..21: note = Synthetic
  source 1..21: mol_type = other RNA
gtcctactttacatatgcttt

SEQ ID NO: 1055 - RNA, 21 nt, synthetic construct
  misc_feature 1..21: note = Synthetic
  source 1..21: mol_type = other RNA
tcctactttacatatgcttta

SEQ ID NO: 1056 - RNA, 21 nt, synthetic construct
  misc_feature 1..21: note = Synthetic
  source 1..21: mol_type = other RNA
cctactttacatatgctttaa

SEQ ID NO: 1057 - RNA, 21 nt, synthetic construct
  misc_feature 1..21: note = Synthetic
  source 1..21: mol_type = other RNA
ctactttacatatgctttaat

SEQ ID NO: 1058 - RNA, 21 nt, synthetic construct
  misc_feature 1..21: note = Synthetic
  source 1..21: mol_type = other RNA
tacatatgctttaagaatcga

SEQ ID NO: 1059 - RNA, 21 nt, synthetic construct
  misc_feature 1..21: note = Synthetic
  source 1..21: mol_type = other RNA
catatgctttaagaatcgatt

SEQ ID NO: 1060 - RNA, 21 nt, synthetic construct
  misc_feature 1..21: note = Synthetic
  source 1..21: mol_type = other RNA
atatgctttaagaatcgatgt

SEQ ID NO: 1061 - RNA, 21 nt, synthetic construct
  misc_feature 1..21: note = Synthetic
  source 1..21: mol_type = other RNA
tatgctttaagaatcgatggt

SEQ ID NO: 1062 - RNA, 21 nt, synthetic construct
  misc_feature 1..21: note = Synthetic
  source 1..21: mol_type = other RNA
gggatgcttcatgtgaacgtt

SEQ ID NO: 1063 - RNA, 21 nt, synthetic construct
  misc_feature 1..21: note = Synthetic
  source 1..21: mol_type = other RNA
tgcttctcttgcctaagtatt

SEQ ID NO: 1064 - RNA, 21 nt, synthetic construct
  misc_feature 1..21: note = Synthetic
  source 1..21: mol_type = other RNA
cttctcttgcctaagtattct

SEQ ID NO: 1065 - RNA, 21 nt, synthetic construct
  misc_feature 1..21: note = Synthetic
  source 1..21: mol_type = other RNA
ttctcttgcctaagtattcct

SEQ ID NO: 1066 - RNA, 21 nt, synthetic construct
  misc_feature 1..21: note = Synthetic
  source 1..21: mol_type = other RNA
ctcttgcctaagtattccttt

SEQ ID NO: 1067 - RNA, 21 nt, synthetic construct
  misc_feature 1..21: note = Synthetic
  source 1..21: mol_type = other RNA
cttgcctaagtattcctttct

SEQ ID NO: 1068 - RNA, 21 nt, synthetic construct
  misc_feature 1..21: note = Synthetic
  source 1..21: mol_type = other RNA
tgcctaagtattcctttcctt

SEQ ID NO: 1069 - RNA, 21 nt, synthetic construct
  misc_feature 1..21: note = Synthetic
  source 1..21: mol_type = other RNA
aagtattcctttcctgatcat

SEQ ID NO: 1070 - RNA, 21 nt, synthetic construct
  misc_feature 1..21: note = Synthetic
  source 1..21: mol_type = other RNA
agtattcctttcctgatcact

SEQ ID NO: 1071 - RNA, 21 nt, synthetic construct
  misc_feature 1..21: note = Synthetic
  source 1..21: mol_type = other RNA
gtattcctttcctgatcacta

SEQ ID NO: 1072 - RNA, 21 nt, synthetic construct
  misc_feature 1..21: note = Synthetic
  source 1..21: mol_type = other RNA
tattcctttcctgatcactat

SEQ ID NO: 1073 - RNA, 21 nt, synthetic construct
  misc_feature 1..21: note = Synthetic
  source 1..21: mol_type = other RNA
attcctttcctgatcactatt

SEQ ID NO: 1074 - RNA, 21 nt, synthetic construct
  misc_feature 1..21: note = Synthetic
  source 1..21: mol_type = other RNA
tcctttcctgatcactatgca

SEQ ID NO: 1075 - RNA, 21 nt, synthetic construct
  misc_feature 1..21: note = Synthetic
  source 1..21: mol_type = other RNA
ctttcctgatcactatgcatt

SEQ ID NO: 1076 - RNA, 21 nt, synthetic construct
  misc_feature 1..21: note = Synthetic
  source 1..21: mol_type = other RNA
tttcctgatcactatgcattt

SEQ ID NO: 1077 - RNA, 21 nt, synthetic construct
  misc_feature 1..21: note = Synthetic
  source 1..21: mol_type = other RNA
ttcctgatcactatgcatttt

SEQ ID NO: 1078 - RNA, 21 nt, synthetic construct
  misc_feature 1..21: note = Synthetic
  source 1..21: mol_type = other RNA
ctgatcactatgcattttaaa

SEQ ID NO: 1079 - RNA, 21 nt, synthetic construct
  misc_feature 1..21: note = Synthetic
  source 1..21: mol_type = other RNA
cactatgcattttaaagttaa

SEQ ID NO: 1080 - RNA, 21 nt, synthetic construct
  misc_feature 1..21: note = Synthetic
  source 1..21: mol_type = other RNA
actatgcattttaaagttaaa

SEQ ID NO: 1081 - RNA, 21 nt, synthetic construct
  misc_feature 1..21: note = Synthetic
  source 1..21: mol_type = other RNA
ttccatgactgcattttactt

SEQ ID NO: 1082 - RNA, 21 nt, synthetic construct
  misc_feature 1..21: note = Synthetic
  source 1..21: mol_type = other RNA
ctgcattttactgtacagatt

SEQ ID NO: 1083 - RNA, 21 nt, synthetic construct
  misc_feature 1..21: note = Synthetic
  source 1..21: mol_type = other RNA
attgctgcttctgctatattt

SEQ ID NO: 1084 - RNA, 21 nt, synthetic construct
  misc_feature 1..21: note = Synthetic
  source 1..21: mol_type = other RNA
ttctgctatatttgtgatata

SEQ ID NO: 1085 - RNA, 21 nt, synthetic construct
  misc_feature 1..21: note = Synthetic
  source 1..21: mol_type = other RNA
tctgctatatttgtgatatat

SEQ ID NO: 1086 - RNA, 21 nt, synthetic construct
  misc_feature 1..21: note = Synthetic
  source 1..21: mol_type = other RNA
tgctatatttgtgatatagga

SEQ ID NO: 1087 - RNA, 21 nt, synthetic construct
  misc_feature 1..21: note = Synthetic
  source 1..21: mol_type = other RNA
tttgtgatataggaattaaga

SEQ ID NO: 1088 - RNA, 21 nt, synthetic construct
  misc_feature 1..21: note = Synthetic
  source 1..21: mol_type = other RNA
tcttcgtgcctgttttatgtt

SEQ ID NO: 1089 - RNA, 21 nt, synthetic construct
  misc_feature 1..21: note = Synthetic
  source 1..21: mol_type = other RNA
cttcgtgcctgttttatgtgt

SEQ ID NO: 1090 - RNA, 21 nt, synthetic construct
  misc_feature 1..21: note = Synthetic
  source 1..21: mol_type = other RNA
gttttatgtgcacacattagt

SEQ ID NO: 1091 - RNA, 21 nt, synthetic construct
  misc_feature 1..21: note = Synthetic
  source 1..21: mol_type = other RNA
tgtgcacacattaggcattga

SEQ ID NO: 1092 - RNA, 21 nt, synthetic construct
  misc_feature 1..21: note = Synthetic
  source 1..21: mol_type = other RNA
tgcacacattaggcattgaga

SEQ ID NO: 1093 - RNA, 21 nt, synthetic construct
  misc_feature 1..21: note = Synthetic
  source 1..21: mol_type = other RNA
acacattaggcattgagactt

SEQ ID NO: 1094 - RNA, 21 nt, synthetic construct
  misc_feature 1..21: note = Synthetic
  source 1..21: mol_type = other RNA
tttgtccacgtatctttgggt

SEQ ID NO: 1095 - RNA, 21 nt, synthetic construct
  misc_feature 1..21: note = Synthetic
  source 1..21: mol_type = other RNA
cacgtatctttgggtctttga

SEQ ID NO: 1096 - RNA, 21 nt, synthetic construct
  misc_feature 1..21: note = Synthetic
  source 1..21: mol_type = other RNA
acgtatctttgggtctttgat

SEQ ID NO: 1097 - RNA, 21 nt, synthetic construct
  misc_feature 1..21: note = Synthetic
  source 1..21: mol_type = other RNA
tctttgggtctttgataaaga

SEQ ID NO: 1098 - RNA, 21 nt, synthetic construct
  misc_feature 1..21: note = Synthetic
  source 1..21: mol_type = other RNA
ctttgggtctttgataaagaa

SEQ ID NO: 1099 - RNA, 21 nt, synthetic construct
  misc_feature 1..21: note = Synthetic
  source 1..21: mol_type = other RNA
ttgggtctttgataaagaaaa

SEQ ID NO: 1100 - RNA, 21 nt, synthetic construct
  misc_feature 1..21: note = Synthetic
  source 1..21: mol_type = other RNA
tgggtctttgataaagaaaat

SEQ ID NO: 1101 - RNA, 21 nt, synthetic construct
  misc_feature 1..21: note = Synthetic
  source 1..21: mol_type = other RNA
aaagaatccctgttcattgta

SEQ ID NO: 1102 - RNA, 21 nt, synthetic construct
  misc_feature 1..21: note = Synthetic
  source 1..21: mol_type = other RNA
aagaatccctgttcattgtaa

SEQ ID NO: 1103 - RNA, 21 nt, synthetic construct
  misc_feature 1..21: note = Synthetic
  source 1..21: mol_type = other RNA
agaatccctgttcattgtaat

SEQ ID NO: 1104 - RNA, 21 nt, synthetic construct
  misc_feature 1..21: note = Synthetic
  source 1..21: mol_type = other RNA
gaatccctgttcattgtaagt

SEQ ID NO: 1105 - RNA, 21 nt, synthetic construct
  misc_feature 1..21: note = Synthetic
  source 1..21: mol_type = other RNA
tgttcattgtaagcactttta

SEQ ID NO: 1106 - RNA, 21 nt, synthetic construct
  misc_feature 1..21: note = Synthetic
  source 1..21: mol_type = other RNA
gttcattgtaagcacttttat

SEQ ID NO: 1107 - RNA, 21 nt, synthetic construct
  misc_feature 1..21: note = Synthetic
  source 1..21: mol_type = other RNA
tcattgtaagcacttttacgt

SEQ ID NO: 1108 - RNA, 21 nt, synthetic construct
  misc_feature 1..21: note = Synthetic
  source 1..21: mol_type = other RNA
cattgtaagcacttttacggt

SEQ ID NO: 1109 - RNA, 21 nt, synthetic construct
  misc_feature 1..21: note = Synthetic
  source 1..21: mol_type = other RNA
ctggtcttcaattaccaagaa

SEQ ID NO: 1110 - RNA, 21 nt, synthetic construct
  misc_feature 1..21: note = Synthetic
  source 1..21: mol_type = other RNA
ggtcttcaattaccaagaatt

SEQ ID NO: 1111 - RNA, 21 nt, synthetic construct
  misc_feature 1..21: note = Synthetic
  source 1..21: mol_type = other RNA
tcttcaattaccaagaattct

SEQ ID NO: 1112 - RNA, 21 nt, synthetic construct
  misc_feature 1..21: note = Synthetic
  source 1..21: mol_type = other RNA
cttcaattaccaagaattctt

SEQ ID NO: 1113 - RNA, 21 nt, synthetic construct
  misc_feature 1..21: note = Synthetic
  source 1..21: mol_type = other RNA
ttcaattaccaagaattctct

SEQ ID NO: 1114 - RNA, 21 nt, synthetic construct
  misc_feature 1..21: note = Synthetic
  source 1..21: mol_type = other RNA
tcaattaccaagaattctcca

SEQ ID NO: 1115 - RNA, 21 nt, synthetic construct
  misc_feature 1..21: note = Synthetic
  source 1..21: mol_type = other RNA
aattaccaagaattctccaaa

SEQ ID NO: 1116 - RNA, 21 nt, synthetic construct
  misc_feature 1..21: note = Synthetic
  source 1..21: mol_type = other RNA
ttaccaagaattctccaaaat

SEQ ID NO: 1117 - RNA, 21 nt, synthetic construct
  misc_feature 1..21: note = Synthetic
  source 1..21: mol_type = other RNA
tgattgtacagaatcattgct

SEQ ID NO: 1118 - RNA, 21 nt, synthetic construct
  misc_feature 1..21: note = Synthetic
  source 1..21: mol_type = other RNA
tcattgcttatgacatgatct

SEQ ID NO: 1119 - RNA, 21 nt, synthetic construct
  misc_feature 1..21: note = Synthetic
  source 1..21: mol_type = other RNA
cattgcttatgacatgatcgt

SEQ ID NO: 1120 - RNA, 21 nt, synthetic construct
  misc_feature 1..21: note = Synthetic
  source 1..21: mol_type = other RNA
attgcttatgacatgatcgct

SEQ ID NO: 1121 - RNA, 21 nt, synthetic construct
  misc_feature 1..21: note = Synthetic
  source 1..21: mol_type = other RNA
ttgcttatgacatgatcgctt

SEQ ID NO: 1122 - RNA, 21 nt, synthetic construct
  misc_feature 1..21: note = Synthetic
  source 1..21: mol_type = other RNA
tgcttatgacatgatcgcttt

SEQ ID NO: 1123 - RNA, 21 nt, synthetic construct
  misc_feature 1..21: note = Synthetic
  source 1..21: mol_type = other RNA
gcttatgacatgatcgctttc

SEQ ID NO: 1124 - RNA, 21 nt, synthetic construct
  misc_feature 1..21: note = Synthetic
  source 1..21: mol_type = other RNA
cttatgacatgatcgctttct

SEQ ID NO: 1125 - RNA, 21 nt, synthetic construct
  misc_feature 1..21: note = Synthetic
  source 1..21: mol_type = other RNA
ttatgacatgatcgctttcta

SEQ ID NO: 1126 - RNA, 21 nt, synthetic construct
  misc_feature 1..21: note = Synthetic
  source 1..21: mol_type = other RNA
tatgacatgatcgctttctat

SEQ ID NO: 1127 - RNA, 21 nt, synthetic construct
  misc_feature 1..21: note = Synthetic
  source 1..21: mol_type = other RNA
atgacatgatcgctttctaca

SEQ ID NO: 1128 - RNA, 21 nt, synthetic construct
  misc_feature 1..21: note = Synthetic
  source 1..21: mol_type = other RNA
tgacatgatcgctttctacat

SEQ ID NO: 1129 - RNA, 21 nt, synthetic construct
  misc_feature 1..21: note = Synthetic
  source 1..21: mol_type = other RNA
catgatcgctttctacactgt

SEQ ID NO: 1130 - RNA, 21 nt, synthetic construct
  misc_feature 1..21: note = Synthetic
  source 1..21: mol_type = other RNA
tgatcgctttctacactgtat

SEQ ID NO: 1131 - RNA, 21 nt, synthetic construct
  misc_feature 1..21: note = Synthetic
  source 1..21: mol_type = other RNA
gatcgctttctacactgtatt

SEQ ID NO: 1132 - RNA, 21 nt, synthetic construct
  misc_feature 1..21: note = Synthetic
  source 1..21: mol_type = other RNA
atcgctttctacactgtatta

SEQ ID NO: 1133 - RNA, 21 nt, synthetic construct
  misc_feature 1..21: note = Synthetic
  source 1..21: mol_type = other RNA
tcgctttctacactgtattat

SEQ ID NO: 1134 - RNA, 21 nt, synthetic construct
  misc_feature 1..21: note = Synthetic
  source 1..21: mol_type = other RNA
cgctttctacactgtattaca

SEQ ID NO: 1135 - RNA, 21 nt, synthetic construct
  misc_feature 1..21: note = Synthetic
  source 1..21: mol_type = other RNA
ctttctacactgtattacata

SEQ ID NO: 1136 - RNA, 21 nt, synthetic construct
  misc_feature 1..21: note = Synthetic
  source 1..21: mol_type = other RNA
ttctacactgtattacataaa

SEQ ID NO: 1137 - RNA, 21 nt, synthetic construct
  misc_feature 1..21: note = Synthetic
  source 1..21: mol_type = other RNA
tctacactgtattacataaat

SEQ ID NO: 1138 - RNA, 21 nt, synthetic construct
  misc_feature 1..21: note = Synthetic
  source 1..21: mol_type = other RNA
gattcaattttctttaaccat

SEQ ID NO: 1139 - RNA, 21 nt, synthetic construct
  misc_feature 1..21: note = Synthetic
  source 1..21: mol_type = other RNA
attttctttaaccagtctgaa

SEQ ID NO: 1140 - RNA, 21 nt, synthetic construct
  misc_feature 1..21: note = Synthetic
  source 1..21: mol_type = other RNA
tttctttaaccagtctgaagt

SEQ ID NO: 1141 - RNA, 21 nt, synthetic construct
  misc_feature 1..21: note = Synthetic
  source 1..21: mol_type = other RNA
tctttaaccagtctgaagttt

SEQ ID NO: 1142 - RNA, 21 nt, synthetic construct
  misc_feature 1..21: note = Synthetic
  source 1..21: mol_type = other RNA
ctttaaccagtctgaagtttc

SEQ ID NO: 1143 - RNA, 21 nt, synthetic construct
  misc_feature 1..21: note = Synthetic
  source 1..21: mol_type = other RNA
ctgaagtttcatttatgatat

SEQ ID NO: 1144 - RNA, 21 nt, synthetic construct
  misc_feature 1..21: note = Synthetic
  source 1..21: mol_type = other RNA
gaagtttcatttatgatacaa

SEQ ID NO: 1145 - RNA, 21 nt, synthetic construct
  misc_feature 1..21: note = Synthetic
  source 1..21: mol_type = other RNA
aaatggaagtggcaatataat

SEQ ID NO: 1146 - RNA, 21 nt, synthetic construct
  misc_feature 1..21: note = Synthetic
  source 1..21: mol_type = other RNA
atggaagtggcaatataaggt

SEQ ID NO: 1147 - RNA, 21 nt, synthetic construct
  misc_feature 1..21: note = Synthetic
  source 1..21: mol_type = other RNA
tgcctggacaaacccttcttt

SEQ ID NO: 1148 - RNA, 21 nt, synthetic construct
  misc_feature 1..21: note = Synthetic
  source 1..21: mol_type = other RNA
ttcttttaagatgtgtcttca

SEQ ID NO: 1149 - RNA, 21 nt, synthetic construct
  misc_feature 1..21: note = Synthetic
  source 1..21: mol_type = other RNA
cttttaagatgtgtcttcaat

SEQ ID NO: 1150 - RNA, 21 nt, synthetic construct
  misc_feature 1..21: note = Synthetic
  source 1..21: mol_type = other RNA
ttttaagatgtgtcttcaatt

SEQ ID NO: 1151 - RNA, 21 nt, synthetic construct
  misc_feature 1..21: note = Synthetic
  source 1..21: mol_type = other RNA
tttaagatgtgtcttcaattt

SEQ ID NO: 1152 - RNA, 21 nt, synthetic construct
  misc_feature 1..21: note = Synthetic
  source 1..21: mol_type = other RNA
ttaagatgtgtcttcaatttg

SEQ ID NO: 1153 - RNA, 21 nt, synthetic construct
  misc_feature 1..21: note = Synthetic
  source 1..21: mol_type = other RNA
taagatgtgtcttcaatttgt

SEQ ID NO: 1154 - RNA, 21 nt, synthetic construct
  misc_feature 1..21: note = Synthetic
  source 1..21: mol_type = other RNA
aagatgtgtcttcaatttgta

SEQ ID NO: 1155 - RNA, 21 nt, synthetic construct
  misc_feature 1..21: note = Synthetic
  source 1..21: mol_type = other RNA
agatgtgtcttcaatttgtat

SEQ ID NO: 1156 - RNA, 21 nt, synthetic construct
  misc_feature 1..21: note = Synthetic
  source 1..21: mol_type = other RNA
atgtgtcttcaatttgtataa

SEQ ID NO: 1157 - RNA, 21 nt, synthetic construct
  misc_feature 1..21: note = Synthetic
  source 1..21: mol_type = other RNA
tgtcttcaatttgtataaaat

SEQ ID NO: 1158 - RNA, 21 nt, synthetic construct
  misc_feature 1..21: note = Synthetic
  source 1..21: mol_type = other RNA
cttcaatttgtataaaatggt

SEQ ID NO: 1159 - RNA, 21 nt, synthetic construct
  misc_feature 1..21: note = Synthetic
  source 1..21: mol_type = other RNA
atggtgttttcatgtaaataa

SEQ ID NO: 1160 - RNA, 21 nt, synthetic construct
  misc_feature 1..21: note = Synthetic
  source 1..21: mol_type = other RNA
gtaaataaatacattcttgga

SEQ ID NO: 1161 - DNA, 23 bp, synthetic construct
  misc_feature 1..23: note = Synthetic
  source 1..23: mol_type = other DNA
ataaactttgggacatggcgctg

SEQ ID NO: 1162 - RNA, 23 nt, synthetic construct
  misc_feature 1..23: note = Synthetic
  source 1..23: mol_type = other RNA
tttaacaggatctcgggcaagag

SEQ ID NO: 1163 - RNA, 23 nt, synthetic construct
  misc_feature 1..23: note = Synthetic
  source 1..23: mol_type = other RNA
atttaacaggatctcgggcaaga

SEQ ID NO: 1164 - RNA, 23 nt, synthetic construct
  misc_feature 1..23: note = Synthetic
  source 1..23: mol_type = other RNA
agtttaacaggatctcgggcaag

SEQ ID NO: 1165 - RNA, 23 nt, synthetic construct
  misc_feature 1..23: note = Synthetic
  source 1..23: mol_type = other RNA
tgtaggaagtttaacaggatctc

SEQ ID NO: 1166 - RNA, 23 nt, synthetic construct
  misc_feature 1..23: note = Synthetic
  source 1..23: mol_type = other RNA
ttgtaggaagtttaacaggatct

SEQ ID NO: 1167 - RNA, 23 nt, synthetic construct
  misc_feature 1..23: note = Synthetic
  source 1..23: mol_type = other RNA
attttgctctttctgaagcagct

SEQ ID NO: 1168 - RNA, 23 nt, synthetic construct
  misc_feature 1..23: note = Synthetic
  source 1..23: mol_type = other RNA
tgaatagttttgctctttctgaa

SEQ ID NO: 1169 - DNA, 23 bp, synthetic construct
  misc_feature 1..23: note = Synthetic
  source 1..23: mol_type = other DNA
atcatctgaatagttttgctctt

SEQ ID NO: 1170 - RNA, 23 nt, synthetic construct
  misc_feature 1..23: note = Synthetic
  source 1..23: mol_type = other RNA
agacgtcatctgaatagttttgc

SEQ ID NO: 1171 - DNA, 23 bp, synthetic construct
  misc_feature 1..23: note = Synthetic
  source 1..23: mol_type = other DNA
aagacgtcatctgaatagttttg

SEQ ID NO: 1172 - RNA, 23 nt, synthetic construct
  misc_feature 1..23: note = Synthetic
  source 1..23: mol_type = other RNA
acaagacgtcatctgaatagttt

SEQ ID NO: 1173 - RNA, 23 nt, synthetic construct
  misc_feature 1..23: note = Synthetic
  source 1..23: mol_type = other RNA
ttggccaagacgtcatctgaata

SEQ ID NO: 1174 - RNA, 23 nt, synthetic construct
  misc_feature 1..23: note = Synthetic
  source 1..23: mol_type = other RNA
agttcactaatcatgttggccaa

SEQ ID NO: 1175 - RNA, 23 nt, synthetic construct
  misc_feature 1..23: note = Synthetic
  source 1..23: mol_type = other RNA
ttggttcactaatcatgttggcc

SEQ ID NO: 1176 - DNA, 23 bp, synthetic construct
  misc_feature 1..23: note = Synthetic
  source 1..23: mol_type = other DNA
aatccttggttcactaatcatgt

SEQ ID NO: 1177 - RNA, 23 nt, synthetic construct
  misc_feature 1..23: note = Synthetic
  source 1..23: mol_type = other RNA
actgatccttggttcactaatca

SEQ ID NO: 1178 - DNA, 23 bp, synthetic construct
  misc_feature 1..23: note = Synthetic
  source 1..23: mol_type = other DNA
aactgatccttggttcactaatc

SEQ ID NO: 1179 - RNA, 23 nt, synthetic construct
  misc_feature 1..23: note = Synthetic
  source 1..23: mol_type = other RNA
ataactgatccttggttcactaa

SEQ ID NO: 1180 - RNA, 23 nt, synthetic construct
  misc_feature 1..23: note = Synthetic
  source 1..23: mol_type = other RNA
acgtaactgatccttggttcact

SEQ ID NO: 1181 - RNA, 23 nt, synthetic construct
  misc_feature 1..23: note = Synthetic
  source 1..23: mol_type = other RNA
tccgtaactgatccttggttcac

SEQ ID NO: 1182 - RNA, 23 nt, synthetic construct
  misc_feature 1..23: note = Synthetic
  source 1..23: mol_type = other RNA
ttccgtaactgatccttggttca

SEQ ID NO: 1183 - RNA, 23 nt, synthetic construct
  misc_feature 1..23: note = Synthetic
  source 1..23: mol_type = other RNA
agtttccgtaactgatccttggt

SEQ ID NO: 1184 - RNA, 23 nt, synthetic construct
  misc_feature 1..23: note = Synthetic
  source 1..23: mol_type = other RNA
tcgtttccgtaactgatccttgg

SEQ ID NO: 1185 - DNA, 23 bp, synthetic construct
  misc_feature 1..23: note = Synthetic
  source 1..23: mol_type = other DNA
aatcgtttccgtaactgatcctt

SEQ ID NO: 1186 - DNA, 23 bp, synthetic construct
  misc_feature 1..23: note = Synthetic
  source 1..23: mol_type = other DNA
acatcgtttccgtaactgatcct

SEQ ID NO: 1187 - RNA, 23 nt, synthetic construct
  misc_feature 1..23: note = Synthetic
  source 1..23: mol_type = other RNA
agcatcgtttccgtaactgatcc

SEQ ID NO: 1188 - RNA, 23 nt, synthetic construct
  misc_feature 1..23: note = Synthetic
  source 1..23: mol_type = other RNA
aagcatcgtttccgtaactgatc

SEQ ID NO: 1189 - DNA, 23 bp, synthetic construct
  misc_feature 1..23: note = Synthetic
  source 1..23: mol_type = other DNA
agagcatcgtttccgtaactgat

SEQ ID NO: 1190 - RNA, 23 nt, synthetic construct
  misc_feature 1..23: note = Synthetic
  source 1..23: mol_type = other RNA
tgagagcatcgtttccgtaactg

SEQ ID NO: 1191 - RNA, 23 nt, synthetic construct
  misc_feature 1..23: note = Synthetic
  source 1..23: mol_type = other RNA
aatgagagcatcgtttccgtaac

SEQ ID NO: 1192 - RNA, 23 nt, synthetic construct
  misc_feature 1..23: note = Synthetic
  source 1..23: mol_type = other RNA
ttcggtcaaagatggcatgagag

SEQ ID NO: 1193 - DNA, 23 bp, synthetic construct
  misc_feature 1..23: note = Synthetic
  source 1..23: mol_type = other DNA
tttcggtcaaagatggcatgaga

SEQ ID NO: 1194 - RNA, 23 nt, synthetic construct
  misc_feature 1..23: note = Synthetic
  source 1..23: mol_type = other RNA
atttcggtcaaagatggcatgag

SEQ ID NO: 1195 - RNA, 23 nt, synthetic construct
  misc_feature 1..23: note = Synthetic
  source 1..23: mol_type = other RNA
agtttcggtcaaagatggcatga

SEQ ID NO: 1196 - DNA, 23 bp, synthetic construct
  misc_feature 1..23: note = Synthetic
  source 1..23: mol_type = other DNA
ttcgtttcggtcaaagatggcat

SEQ ID NO: 1197 - DNA, 23 bp, synthetic construct
  misc_feature 1..23: note = Synthetic
  source 1..23: mol_type = other DNA
tttcgtttcggtcaaagatggca

SEQ ID NO: 1198 - RNA, 23 nt, synthetic construct
  misc_feature 1..23: note = Synthetic
  source 1..23: mol_type = other RNA
agttttcgtttcggtcaaagatg

SEQ ID NO: 1199 - DNA, 23 bp, synthetic construct
  misc_feature 1..23: note = Synthetic
  source 1..23: mol_type = other DNA
aaactctccattcacgggaagga

SEQ ID NO: 1200 - DNA, 23 bp, synthetic construct
  misc_feature 1..23: note = Synthetic
  source 1..23: mol_type = other DNA
tcaacttcgttttctgtgttggc

SEQ ID NO: 1201 - RNA, 23 nt, synthetic construct
  misc_feature 1..23: note = Synthetic
  source 1..23: mol_type = other RNA
atatttgtcaacccagaacctgg

SEQ ID NO: 1202 - DNA, 23 bp, synthetic construct
  misc_feature 1..23: note = Synthetic
  source 1..23: mol_type = other DNA
tgatatttgtcaacccagaacct

SEQ ID NO: 1203 - DNA, 23 bp, synthetic construct
  misc_feature 1..23: note = Synthetic
  source 1..23: mol_type = other DNA
tcttgatatttgtcaacccagaa

SEQ ID NO: 1204 - RNA, 23 nt, synthetic construct
  misc_feature 1..23: note = Synthetic
  source 1..23: mol_type = other RNA
atcttgatatttgtcaacccaga

SEQ ID NO: 1205 - RNA, 23 nt, synthetic construct
  misc_feature 1..23: note = Synthetic
  source 1..23: mol_type = other RNA
aatgtcggaattctgcatccatc

SEQ ID NO: 1206 - DNA, 23 bp, synthetic construct
  misc_feature 1..23: note = Synthetic
  source 1..23: mol_type = other DNA
atcatgtcggaattctgcatcca

SEQ ID NO: 1207 - RNA, 23 nt, synthetic construct
  misc_feature 1..23: note = Synthetic
  source 1..23: mol_type = other RNA
aatgatgaacttcatatcctgag

SEQ ID NO: 1208 - RNA, 23 nt, synthetic construct
  misc_feature 1..23: note = Synthetic
  source 1..23: mol_type = other RNA
tttttgatgatgaacttcatatc

SEQ ID NO: 1209 - DNA, 23 bp, synthetic construct
  misc_feature 1..23: note = Synthetic
  source 1..23: mol_type = other DNA
aaccaatttttgatgatgaactt

SEQ ID NO: 1210 - RNA, 23 nt, synthetic construct
  misc_feature 1..23: note = Synthetic
  source 1..23: mol_type = other RNA
aaacaccaatttttgatgatgaa

SEQ ID NO: 1211 - RNA, 23 nt, synthetic construct
  misc_feature 1..23: note = Synthetic
  source 1..23: mol_type = other RNA
aaagaacaccaatttttgatgat

SEQ ID NO: 1212 - RNA, 23 nt, synthetic construct
  misc_feature 1..23: note = Synthetic
  source 1..23: mol_type = other RNA
caaagaacaccaatttttgatga

SEQ ID NO: 1213 - RNA, 23 nt, synthetic construct
  misc_feature 1..23: note = Synthetic
  source 1..23: mol_type = other RNA
acaaagaacaccaatttttgatg

SEQ ID NO: 1214 - RNA, 23 nt, synthetic construct
  misc_feature 1..23: note = Synthetic
  source 1..23: mol_type = other RNA
ttgtttgaacccacatcttctgc

SEQ ID NO: 1215 - DNA, 23 bp, synthetic construct
  misc_feature 1..23: note = Synthetic
  source 1..23: mol_type = other DNA
atttgtttgaacccacatcttct

SEQ ID NO: 1216 - RNA, 23 nt, synthetic construct
  misc_feature 1..23: note = Synthetic
  source 1..23: mol_type = other RNA
ttgcacctttgtttgaacccaca

SEQ ID NO: 1217 - RNA, 23 nt, synthetic construct
  misc_feature 1..23: note = Synthetic
  source 1..23: mol_type = other RNA
aattgcacctttgtttgaaccca

SEQ ID NO: 1218 - RNA, 23 nt, synthetic construct
  misc_feature 1..23: note = Synthetic
  source 1..23: mol_type = other RNA
aacgatcactgtcgctatgacaa

SEQ ID NO: 1219 - RNA, 23 nt, synthetic construct
  misc_feature 1..23: note = Synthetic
  source 1..23: mol_type = other RNA
aatgacgatcactgtcgctatga

SEQ ID NO: 1220 - DNA, 23 bp, synthetic construct
  misc_feature 1..23: note = Synthetic
  source 1..23: mol_type = other DNA
acaaggtgatgacgatcactgtc

SEQ ID NO: 1221 - RNA, 23 nt, synthetic construct
  misc_feature 1..23: note = Synthetic
  source 1..23: mol_type = other RNA
tgtgtactgtttcttcttcagca

SEQ ID NO: 1222 - RNA, 23 nt, synthetic construct
  misc_feature 1..23: note = Synthetic
  source 1..23: mol_type = other RNA
atgatgaatggatgtgtactgtt

SEQ ID NO: 1223 - DNA, 23 bp, synthetic construct
  misc_feature 1..23: note = Synthetic
  source 1..23: mol_type = other DNA
acgttctgctgcatcttggacag

SEQ ID NO: 1224 - DNA, 23 bp, synthetic construct
  misc_feature 1..23: note = Synthetic
  source 1..23: mol_type = other DNA
attggattttcgtagccgttctg

SEQ ID NO: 1225 - RNA, 23 nt, synthetic construct
  misc_feature 1..23: note = Synthetic
  source 1..23: mol_type = other RNA
agttggattttcgtagccgttct

SEQ ID NO: 1226 - RNA, 23 nt, synthetic construct
  misc_feature 1..23: note = Synthetic
  source 1..23: mol_type = other RNA
aggttggattttcgtagccgttc

SEQ ID NO: 1227 - DNA, 23 bp, synthetic construct
  misc_feature 1..23: note = Synthetic
  source 1..23: mol_type = other DNA
ataggttggattttcgtagccgt

SEQ ID NO: 1228 - DNA, 23 bp, synthetic construct
  misc_feature 1..23: note = Synthetic
  source 1..23: mol_type = other DNA
tgtaggttggattttcgtagccg

SEQ ID NO: 1229 - RNA, 23 nt, synthetic construct
  misc_feature 1..23: note = Synthetic
  source 1..23: mol_type = other RNA
ttgtaggttggattttcgtagcc

SEQ ID NO: 1230 - RNA, 23 nt, synthetic construct
  misc_feature 1..23: note = Synthetic
  source 1..23: mol_type = other RNA
attgtaggttggattttcgtagc

SEQ ID NO: 1231 - RNA, 23 nt, synthetic construct
  misc_feature 1..23: note = Synthetic
  source 1..23: mol_type = other RNA
acttgtaggttggattttcgtag

SEQ ID NO: 1232 - DNA, 23 bp, synthetic construct
  misc_feature 1..23: note = Synthetic
  source 1..23: mol_type = other DNA
agaacttgtaggttggattttcg

SEQ ID NO: 1233 - DNA, 23 bp, synthetic construct
  misc_feature 1..23: note = Synthetic
  source 1..23: mol_type = other DNA
aagaacttgtaggttggattttc

SEQ ID NO: 1234 - RNA, 23 nt, synthetic construct
  misc_feature 1..23: note = Synthetic
  source 1..23: mol_type = other RNA
caaagaacttgtaggttggattt

SEQ ID NO: 1235 - RNA, 23 nt, synthetic construct
  misc_feature 1..23: note = Synthetic
  source 1..23: mol_type = other RNA
tcaaagaacttgtaggttggatt

SEQ ID NO: 1236 - RNA, 23 nt, synthetic construct
  misc_feature 1..23: note = Synthetic
  source 1..23: mol_type = other RNA
atcaaagaacttgtaggttggat

SEQ ID NO: 1237 - RNA, 23 nt, synthetic construct
  misc_feature 1..23: note = Synthetic
  source 1..23: mol_type = other RNA
tttgctgtccaacttcagaggct

SEQ ID NO: 1238 - DNA, 23 bp, synthetic construct
  misc_feature 1..23: note = Synthetic
  source 1..23: mol_type = other DNA
aatggttttgctgtccaacttca

SEQ ID NO: 1239 - DNA, 23 bp, synthetic construct
  misc_feature 1..23: note = Synthetic
  source 1..23: mol_type = other DNA
aaatggttttgctgtccaacttc

SEQ ID NO: 1240 - RNA, 23 nt, synthetic construct
  misc_feature 1..23: note = Synthetic
  source 1..23: mol_type = other RNA
agcaatggttttgctgtccaact

SEQ ID NO: 1241 - RNA, 23 nt, synthetic construct
  misc_feature 1..23: note = Synthetic
  source 1..23: mol_type = other RNA
atagtgaagcaatggttttgctg

SEQ ID NO: 1242 - RNA, 23 nt, synthetic construct
  misc_feature 1..23: note = Synthetic
  source 1..23: mol_type = other RNA
tgggtagtgaagcaatggttttg

SEQ ID NO: 1243 - RNA, 23 nt, synthetic construct
  misc_feature 1..23: note = Synthetic
  source 1..23: mol_type = other RNA
ataaatggacaccgatgggtagt

SEQ ID NO: 1244 - DNA, 23 bp, synthetic construct
  misc_feature 1..23: note = Synthetic
  source 1..23: mol_type = other DNA
tataaatggacaccgatgggtag

SEQ ID NO: 1245 - RNA, 23 nt, synthetic construct
  misc_feature 1..23: note = Synthetic
  source 1..23: mol_type = other RNA
atataaatggacaccgatgggta

SEQ ID NO: 1246 - RNA, 23 nt, synthetic construct
  misc_feature 1..23: note = Synthetic
  source 1..23: mol_type = other RNA
tctataaatggacaccgatgggt

SEQ ID NO: 1247 - DNA, 23 bp, synthetic construct
  misc_feature 1..23: note = Synthetic
  source 1..23: mol_type = other DNA
attctataaatggacaccgatgg

SEQ ID NO: 1248 - RNA, 23 nt, synthetic construct
  misc_feature 1..23: note = Synthetic
  source 1..23: mol_type = other RNA
tattctataaatggacaccgatg

SEQ ID NO: 1249 - RNA, 23 nt, synthetic construct
  misc_feature 1..23: note = Synthetic
  source 1..23: mol_type = other RNA
tgagtaaatcataaaacgggttt

SEQ ID NO: 1250 - RNA, 23 nt, synthetic construct
  misc_feature 1..23: note = Synthetic
  source 1..23: mol_type = other RNA
atgagtaaatcataaaacgggtt

SEQ ID NO: 1251 - RNA, 23 nt, synthetic construct
  misc_feature 1..23: note = Synthetic
  source 1..23: mol_type = other RNA
acgataatgagtaaatcataaaa

SEQ ID NO: 1252 - DNA, 23 bp, synthetic construct
  misc_feature 1..23: note = Synthetic
  source 1..23: mol_type = other DNA
aggcgataatgagtaaatcataa

SEQ ID NO: 1253 - RNA, 23 nt, synthetic construct
  misc_feature 1..23: note = Synthetic
  source 1..23: mol_type = other RNA
aaggcgataatgagtaaatcata

SEQ ID NO: 1254 - RNA, 23 nt, synthetic construct
  misc_feature 1..23: note = Synthetic
  source 1..23: mol_type = other RNA
aaaggcgataatgagtaaatcat

SEQ ID NO: 1255 - RNA, 23 nt, synthetic construct
  misc_feature 1..23: note = Synthetic
  source 1..23: mol_type = other RNA
aaaaggcgataatgagtaaatca

SEQ ID NO: 1256 - RNA, 23 nt, synthetic construct
  misc_feature 1..23: note = Synthetic
  source 1..23: mol_type = other RNA
caaaaggcgataatgagtaaatc

SEQ ID NO: 1257 - RNA, 23 nt, synthetic construct
  misc_feature 1..23: note = Synthetic
  source 1..23: mol_type = other RNA
atcaaaaggcgataatgagtaaa

SEQ ID NO: 1258 - RNA, 23 nt, synthetic construct
  misc_feature 1..23: note = Synthetic
  source 1..23: mol_type = other RNA
tgtcaaaaggcgataatgagtaa

SEQ ID NO: 1259 - RNA, 23 nt, synthetic construct
  misc_feature 1..23: note = Synthetic
  source 1..23: mol_type = other RNA
atgtcaaaaggcgataatgagta

SEQ ID NO: 1260 - RNA, 23 nt, synthetic construct
  misc_feature 1..23: note = Synthetic
  source 1..23: mol_type = other RNA
acagctgtcaaaaggcgataatg

SEQ ID NO: 1261 - RNA, 23 nt, synthetic construct
  misc_feature 1..23: note = Synthetic
  source 1..23: mol_type = other RNA
acacagctgtcaaaaggcgataa

SEQ ID NO: 1262 - RNA, 23 nt, synthetic construct
  misc_feature 1..23: note = Synthetic
  source 1..23: mol_type = other RNA
attacagcacagctgtcaaaagg

SEQ ID NO: 1263 - RNA, 23 nt, synthetic construct
  misc_feature 1..23: note = Synthetic
  source 1..23: mol_type = other RNA
atgttacagcacagctgtcaaaa

SEQ ID NO: 1264 - DNA, 23 bp, synthetic construct
  misc_feature 1..23: note = Synthetic
  source 1..23: mol_type = other DNA
attgtgttacagcacagctgtca

SEQ ID NO: 1265 - DNA, 23 bp, synthetic construct
  misc_feature 1..23: note = Synthetic
  source 1..23: mol_type = other DNA
tacttgtgttacagcacagctgt

SEQ ID NO: 1266 - DNA, 23 bp, synthetic construct
  misc_feature 1..23: note = Synthetic
  source 1..23: mol_type = other DNA
atctacttgtgttacagcacagc

SEQ ID NO: 1267 - RNA, 23 nt, synthetic construct
  misc_feature 1..23: note = Synthetic
  source 1..23: mol_type = other RNA
aatctacttgtgttacagcacag

SEQ ID NO: 1268 - DNA, 23 bp, synthetic construct
  misc_feature 1..23: note = Synthetic
  source 1..23: mol_type = other DNA
agcatctacttgtgttacagcac

SEQ ID NO: 1269 - RNA, 23 nt, synthetic construct
  misc_feature 1..23: note = Synthetic
  source 1..23: mol_type = other RNA
agttcaggcatctacttgtgtta

SEQ ID NO: 1270 - DNA, 23 bp, synthetic construct
  misc_feature 1..23: note = Synthetic
  source 1..23: mol_type = other DNA
ttcaagttcaggcatctacttgt

SEQ ID NO: 1271 - RNA, 23 nt, synthetic construct
  misc_feature 1..23: note = Synthetic
  source 1..23: mol_type = other RNA
aattcaagttcaggcatctactt

SEQ ID NO: 1272 - RNA, 23 nt, synthetic construct
  misc_feature 1..23: note = Synthetic
  source 1..23: mol_type = other RNA
agattaattcaagttcaggcatc

SEQ ID NO: 1273 - DNA, 23 bp, synthetic construct
  misc_feature 1..23: note = Synthetic
  source 1..23: mol_type = other DNA
atggattaattcaagttcaggca

SEQ ID NO: 1274 - DNA, 23 bp, synthetic construct
  misc_feature 1..23: note = Synthetic
  source 1..23: mol_type = other DNA
tgtggattaattcaagttcaggc

SEQ ID NO: 1275 - DNA, 23 bp, synthetic construct
  misc_feature 1..23: note = Synthetic
  source 1..23: mol_type = other DNA
atacattactgatgtgtggatta

SEQ ID NO: 1276 - DNA, 23 bp, synthetic construct
  misc_feature 1..23: note = Synthetic
  source 1..23: mol_type = other DNA
aatacattactgatgtgtggatt

SEQ ID NO: 1277 - RNA, 23 nt, synthetic construct
  misc_feature 1..23: note = Synthetic
  source 1..23: mol_type = other RNA
aaatacattactgatgtgtggat

SEQ ID NO: 1278 - RNA, 23 nt, synthetic construct
  misc_feature 1..23: note = Synthetic
  source 1..23: mol_type = other RNA
agaatacattactgatgtgtgga

SEQ ID NO: 1279 - RNA, 23 nt, synthetic construct
  misc_feature 1..23: note = Synthetic
  source 1..23: mol_type = other RNA
tagaatacattactgatgtgtgg

SEQ ID NO: 1280 - RNA, 23 nt, synthetic construct
  misc_feature 1..23: note = Synthetic
  source 1..23: mol_type = other RNA
tgtaaagagagatagaatacatt

SEQ ID NO: 1281 - DNA, 23 bp, synthetic construct
  misc_feature 1..23: note = Synthetic
  source 1..23: mol_type = other DNA
acaaaatgtaaagagagatagaa

SEQ ID NO: 1282 - RNA, 23 nt, synthetic construct
  misc_feature 1..23: note = Synthetic
  source 1..23: mol_type = other RNA
accaaaatgtaaagagagataga

SEQ ID NO: 1283 - RNA, 23 nt, synthetic construct
  misc_feature 1..23: note = Synthetic
  source 1..23: mol_type = other RNA
aaccaaaatgtaaagagagatag

SEQ ID NO: 1284 - RNA, 23 nt, synthetic construct
  misc_feature 1..23: note = Synthetic
  source 1..23: mol_type = other RNA
agaccaaaatgtaaagagagata

SEQ ID NO: 1285 - RNA, 23 nt, synthetic construct
  misc_feature 1..23: note = Synthetic
  source 1..23: mol_type = other RNA
aagaccaaaatgtaaagagagat

SEQ ID NO: 1286 - RNA, 23 nt, synthetic construct
  misc_feature 1..23: note = Synthetic
  source 1..23: mol_type = other RNA
atagagaccaaaatgtaaagaga

SEQ ID NO: 1287 - RNA, 23 nt, synthetic construct
  misc_feature 1..23: note = Synthetic
  source 1..23: mol_type = other RNA
aataatgtagtatagagaccaaa

SEQ ID NO: 1288 - DNA, 23 bp, synthetic construct
  misc_feature 1..23: note = Synthetic
  source 1..23: mol_type = other DNA
taataatgtagtatagagaccaa

SEQ ID NO: 1289 - RNA, 23 nt, synthetic construct
  misc_feature 1..23: note = Synthetic
  source 1..23: mol_type = other RNA
ttaataatgtagtatagagacca

SEQ ID NO: 1290 - RNA, 23 nt, synthetic construct
  misc_feature 1..23: note = Synthetic
  source 1..23: mol_type = other RNA
attaataatgtagtatagagacc

SEQ ID NO: 1291 - DNA, 23 bp, synthetic construct
  misc_feature 1..23: note = Synthetic
  source 1..23: mol_type = other DNA
aattaataatgtagtatagagac

SEQ ID NO: 1292 - RNA, 23 nt, synthetic construct
  misc_feature 1..23: note = Synthetic
  source 1..23: mol_type = other RNA
acattaataatgtagtatagaga

SEQ ID NO: 1293 - RNA, 23 nt, synthetic construct
  misc_feature 1..23: note = Synthetic
  source 1..23: mol_type = other RNA
accattaataatgtagtatagag

SEQ ID NO: 1294 - RNA, 23 nt, synthetic construct
  misc_feature 1..23: note = Synthetic
  source 1..23: mol_type = other RNA
tttacagtacacaaaacccatta

SEQ ID NO: 1295 - DNA, 23 bp, synthetic construct
  misc_feature 1..23: note = Synthetic
  source 1..23: mol_type = other DNA
aaattctttacagtacacaaaac

SEQ ID NO: 1296 - RNA, 23 nt, synthetic construct
  misc_feature 1..23: note = Synthetic
  source 1..23: mol_type = other RNA
taaattctttacagtacacaaaa

SEQ ID NO: 1297 - DNA, 23 bp, synthetic construct
  misc_feature 1..23: note = Synthetic
  source 1..23: mol_type = other DNA
ataaattctttacagtacacaaa

SEQ ID NO: 1298 - DNA, 23 bp, synthetic construct
  misc_feature 1..23: note = Synthetic
  source 1..23: mol_type = other DNA
actaaattctttacagtacacaa

SEQ ID NO: 1299 - RNA, 23 nt, synthetic construct
  misc_feature 1..23: note = Synthetic
  source 1..23: mol_type = other RNA
aagctaaattctttacagtacac

SEQ ID NO: 1300 - DNA, 23 bp, synthetic construct
  misc_feature 1..23: note = Synthetic
  source 1..23: mol_type = other DNA
actagtttgatacagctaaattc

SEQ ID NO: 1301 - DNA, 23 bp, synthetic construct
  misc_feature 1..23: note = Synthetic
  source 1..23: mol_type = other DNA
aactagtttgatacagctaaatt

SEQ ID NO: 1302 - RNA, 23 nt, synthetic construct
  misc_feature 1..23: note = Synthetic
  source 1..23: mol_type = other RNA
aatgcactagtttgatacagcta

SEQ ID NO: 1303 - RNA, 23 nt, synthetic construct
  misc_feature 1..23: note = Synthetic
  source 1..23: mol_type = other RNA
aagaatctattcatgcactagtt

SEQ ID NO: 1304 - DNA, 23 bp, synthetic construct
  misc_feature 1..23: note = Synthetic
  source 1..23: mol_type = other DNA
agagaatctattcatgcactagt

SEQ ID NO: 1305 - RNA, 23 nt, synthetic construct
  misc_feature 1..23: note = Synthetic
  source 1..23: mol_type = other RNA
taatcaggagagaatctattcat

SEQ ID NO: 1306 - RNA, 23 nt, synthetic construct
  misc_feature 1..23: note = Synthetic
  source 1..23: mol_type = other RNA
tgtgataaataatcaggagagaa

SEQ ID NO: 1307 - DNA, 23 bp, synthetic construct
  misc_feature 1..23: note = Synthetic
  source 1..23: mol_type = other DNA
atgtgataaataatcaggagaga

SEQ ID NO: 1308 - RNA, 23 nt, synthetic construct
  misc_feature 1..23: note = Synthetic
  source 1..23: mol_type = other RNA
tatgtgataaataatcaggagag

SEQ ID NO: 1309 - RNA, 23 nt, synthetic construct
  misc_feature 1..23: note = Synthetic
  source 1..23: mol_type = other RNA
atatgtgataaataatcaggaga

SEQ ID NO: 1310 - DNA, 23 bp, synthetic construct
  misc_feature 1..23: note = Synthetic
  source 1..23: mol_type = other DNA
actatgtgataaataatcaggag

SEQ ID NO: 1311 - DNA, 23 bp, synthetic construct
  misc_feature 1..23: note = Synthetic
  source 1..23: mol_type = other DNA
aaagaataatatacaactggcta

SEQ ID NO: 1312 - RNA, 23 nt, synthetic construct
  misc_feature 1..23: note = Synthetic
  source 1..23: mol_type = other RNA
aaccacaagaataatatacaact

SEQ ID NO: 1313 - DNA, 23 bp, synthetic construct
  misc_feature 1..23: note = Synthetic
  source 1..23: mol_type = other DNA
attgggtcacaaaccacaagaat

SEQ ID NO: 1314 - RNA, 23 nt, synthetic construct
  misc_feature 1..23: note = Synthetic
  source 1..23: mol_type = other RNA
aattgggtcacaaaccacaagaa

SEQ ID NO: 1315 - RNA, 23 nt, synthetic construct
  misc_feature 1..23: note = Synthetic
  source 1..23: mol_type = other RNA
taattgggtcacaaaccacaaga

SEQ ID NO: 1316 - RNA, 23 nt, synthetic construct
  misc_feature 1..23: note = Synthetic
  source 1..23: mol_type = other RNA
ttaattgggtcacaaaccacaag

SEQ ID NO: 1317 - RNA, 23 nt, synthetic construct
  misc_feature 1..23: note = Synthetic
  source 1..23: mol_type = other RNA
agacttaattgggtcacaaacca

SEQ ID NO: 1318 - DNA, 23 bp, synthetic construct
  misc_feature 1..23: note = Synthetic
  source 1..23: mol_type = other DNA
aggacttaattgggtcacaaacc

SEQ ID NO: 1319 - DNA, 23 bp, synthetic construct
  misc_feature 1..23: note = Synthetic
  source 1..23: mol_type = other DNA
taggacttaattgggtcacaaac

SEQ ID NO: 1320 - RNA, 23 nt, synthetic construct
  misc_feature 1..23: note = Synthetic
  source 1..23: mol_type = other RNA
ataggacttaattgggtcacaaa

SEQ ID NO: 1321 - RNA, 23 nt, synthetic construct
  misc_feature 1..23: note = Synthetic
  source 1..23: mol_type = other RNA
agtaggacttaattgggtcacaa

SEQ ID NO: 1322 - RNA, 23 nt, synthetic construct
  misc_feature 1..23: note = Synthetic
  source 1..23: mol_type = other RNA
aaagtaggacttaattgggtcac

SEQ ID NO: 1323 - RNA, 23 nt, synthetic construct
  misc_feature 1..23: note = Synthetic
  source 1..23: mol_type = other RNA
taaagtaggacttaattgggtca

SEQ ID NO: 1324 - DNA, 23 bp, synthetic construct
  misc_feature 1..23: note = Synthetic
  source 1..23: mol_type = other DNA
ataaagtaggacttaattgggtc

SEQ ID NO: 1325 - RNA, 23 nt, synthetic construct
  misc_feature 1..23: note = Synthetic
  source 1..23: mol_type = other RNA
tatgtaaagtaggacttaattgg

SEQ ID NO: 1326 - RNA, 23 nt, synthetic construct
  misc_feature 1..23: note = Synthetic
  source 1..23: mol_type = other RNA
acatatgtaaagtaggacttaat

SEQ ID NO: 1327 - RNA, 23 nt, synthetic construct
  misc_feature 1..23: note = Synthetic
  source 1..23: mol_type = other RNA
aagcatatgtaaagtaggactta

SEQ ID NO: 1328 - DNA, 23 bp, synthetic construct
  misc_feature 1..23: note = Synthetic
  source 1..23: mol_type = other DNA
aaagcatatgtaaagtaggactt

SEQ ID NO: 1329 - RNA, 23 nt, synthetic construct
  misc_feature 1..23: note = Synthetic
  source 1..23: mol_type = other RNA
taaagcatatgtaaagtaggact

SEQ ID NO: 1330 - RNA, 23 nt, synthetic construct
  misc_feature 1..23: note = Synthetic
  source 1..23: mol_type = other RNA
ttaaagcatatgtaaagtaggac

SEQ ID NO: 1331 - RNA, 23 nt, synthetic construct
  misc_feature 1..23: note = Synthetic
  source 1..23: mol_type = other RNA
attaaagcatatgtaaagtagga

SEQ ID NO: 1332 - RNA, 23 nt, synthetic construct
  misc_feature 1..23: note = Synthetic
  source 1..23: mol_type = other RNA
tcgattcttaaagcatatgtaaa

SEQ ID NO: 1333 - DNA, 23 bp, synthetic construct
  misc_feature 1..23: note = Synthetic
  source 1..23: mol_type = other DNA
aatcgattcttaaagcatatgta

SEQ ID NO: 1334 - RNA, 23 nt, synthetic construct
  misc_feature 1..23: note = Synthetic
  source 1..23: mol_type = other RNA
acatcgattcttaaagcatatgt

SEQ ID NO: 1335 - RNA, 23 nt, synthetic construct
  misc_feature 1..23: note = Synthetic
  source 1..23: mol_type = other RNA
accatcgattcttaaagcatatg

SEQ ID NO: 1336 - RNA, 23 nt, synthetic construct
  misc_feature 1..23: note = Synthetic
  source 1..23: mol_type = other RNA
aacgttcacatgaagcatccccc

SEQ ID NO: 1337 - DNA, 23 bp, synthetic construct
  misc_feature 1..23: note = Synthetic
  source 1..23: mol_type = other DNA
aatacttaggcaagagaagcagc

SEQ ID NO: 1338 - RNA, 23 nt, synthetic construct
  misc_feature 1..23: note = Synthetic
  source 1..23: mol_type = other RNA
agaatacttaggcaagagaagca

SEQ ID NO: 1339 - RNA, 23 nt, synthetic construct
  misc_feature 1..23: note = Synthetic
  source 1..23: mol_type = other RNA
aggaatacttaggcaagagaagc

SEQ ID NO: 1340 - RNA, 23 nt, synthetic construct
  misc_feature 1..23: note = Synthetic
  source 1..23: mol_type = other RNA
aaaggaatacttaggcaagagaa

SEQ ID NO: 1341 - RNA, 23 nt, synthetic construct
  misc_feature 1..23: note = Synthetic
  source 1..23: mol_type = other RNA
agaaaggaatacttaggcaagag

SEQ ID NO: 1342 - RNA, 23 nt, synthetic construct
  misc_feature 1..23: note = Synthetic
  source 1..23: mol_type = other RNA
aaggaaaggaatacttaggcaag

SEQ ID NO: 1343 - RNA, 23 nt, synthetic construct
  misc_feature 1..23: note = Synthetic
  source 1..23: mol_type = other RNA
atgatcaggaaaggaatacttag

SEQ ID NO: 1344 - RNA, 23 nt, synthetic construct
  misc_feature 1..23: note = Synthetic
  source 1..23: mol_type = other RNA
agtgatcaggaaaggaatactta

SEQ ID NO: 1345 - DNA, 23 bp, synthetic construct
  misc_feature 1..23: note = Synthetic
  source 1..23: mol_type = other DNA
tagtgatcaggaaaggaatactt

SEQ ID NO: 1346 - RNA, 23 nt, synthetic construct
  misc_feature 1..23: note = Synthetic
  source 1..23: mol_type = other RNA
atagtgatcaggaaaggaatact

SEQ ID NO: 1347 - RNA, 23 nt, synthetic construct
  misc_feature 1..23: note = Synthetic
  source 1..23: mol_type = other RNA
aatagtgatcaggaaaggaatac

SEQ ID NO: 1348 - RNA, 23 nt, synthetic construct
  misc_feature 1..23: note = Synthetic
  source 1..23: mol_type = other RNA
tgcatagtgatcaggaaaggaat

SEQ ID NO: 1349 - DNA, 23 bp, synthetic construct
  misc_feature 1..23: note = Synthetic
  source 1..23: mol_type = other DNA
aatgcatagtgatcaggaaagga

SEQ ID NO: 1350 - RNA, 23 nt, synthetic construct
  misc_feature 1..23: note = Synthetic
  source 1..23: mol_type = other RNA
aaatgcatagtgatcaggaaagg

SEQ ID NO: 1351 - RNA, 23 nt, synthetic construct
  misc_feature 1..23: note = Synthetic
  source 1..23: mol_type = other RNA
aaaatgcatagtgatcaggaaag

SEQ ID NO: 1352 - RNA, 23 nt, synthetic construct
  misc_feature 1..23: note = Synthetic
  source 1..23: mol_type = other RNA
tttaaaatgcatagtgatcagga

SEQ ID NO: 1353 - DNA, 23 bp, synthetic construct
  misc_feature 1..23: note = Synthetic
  source 1..23: mol_type = other DNA
ttaactttaaaatgcatagtgat

SEQ ID NO: 1354 - DNA, 23 bp, synthetic construct
  misc_feature 1..23: note = Synthetic
  source 1..23: mol_type = other DNA
tttaactttaaaatgcatagtga

SEQ ID NO: 1355 - RNA, 23 nt, synthetic construct
  misc_feature 1..23: note = Synthetic
  source 1..23: mol_type = other RNA
aagtaaaatgcagtcatggaaaa

SEQ ID NO: 1356 - DNA, 23 bp, synthetic construct
  misc_feature 1..23: note = Synthetic
  source 1..23: mol_type = other DNA
aatctgtacagtaaaatgcagtc

SEQ ID NO: 1357 - RNA, 23 nt, synthetic construct
  misc_feature 1..23: note = Synthetic
  source 1..23: mol_type = other RNA
aaatatagcagaagcagcaatct

SEQ ID NO: 1358 - RNA, 23 nt, synthetic construct
  misc_feature 1..23: note = Synthetic
  source 1..23: mol_type = other RNA
tatatcacaaatatagcagaagc

SEQ ID NO: 1359 - RNA, 23 nt, synthetic construct
  misc_feature 1..23: note = Synthetic
  source 1..23: mol_type = other RNA
atatatcacaaatatagcagaag

SEQ ID NO: 1360 - RNA, 23 nt, synthetic construct
  misc_feature 1..23: note = Synthetic
  source 1..23: mol_type = other RNA
tcctatatcacaaatatagcaga

SEQ ID NO: 1361 - DNA, 23 bp, synthetic construct
  misc_feature 1..23: note = Synthetic
  source 1..23: mol_type = other DNA
tcttaattcctatatcacaaata

SEQ ID NO: 1362 - RNA, 23 nt, synthetic construct
  misc_feature 1..23: note = Synthetic
  source 1..23: mol_type = other RNA
aacataaaacaggcacgaagaaa

SEQ ID NO: 1363 - RNA, 23 nt, synthetic construct
  misc_feature 1..23: note = Synthetic
  source 1..23: mol_type = other RNA
acacataaaacaggcacgaagaa

SEQ ID NO: 1364 - RNA, 23 nt, synthetic construct
  misc_feature 1..23: note = Synthetic
  source 1..23: mol_type = other RNA
actaatgtgtgcacataaaacag

SEQ ID NO: 1365 - RNA, 23 nt, synthetic construct
  misc_feature 1..23: note = Synthetic
  source 1..23: mol_type = other RNA
tcaatgcctaatgtgtgcacata

SEQ ID NO: 1366 - DNA, 23 bp, synthetic construct
  misc_feature 1..23: note = Synthetic
  source 1..23: mol_type = other DNA
tctcaatgcctaatgtgtgcaca

SEQ ID NO: 1367 - RNA, 23 nt, synthetic construct
  misc_feature 1..23: note = Synthetic
  source 1..23: mol_type = other RNA
aagtctcaatgcctaatgtgtgc

SEQ ID NO: 1368 - RNA, 23 nt, synthetic construct
  misc_feature 1..23: note = Synthetic
  source 1..23: mol_type = other RNA
acccaaagatacgtggacaaaaa

SEQ ID NO: 1369 - RNA, 23 nt, synthetic construct
  misc_feature 1..23: note = Synthetic
  source 1..23: mol_type = other RNA
tcaaagacccaaagatacgtgga

SEQ ID NO: 1370 - RNA, 23 nt, synthetic construct
  misc_feature 1..23: note = Synthetic
  source 1..23: mol_type = other RNA
atcaaagacccaaagatacgtgg

SEQ ID NO: 1371 - DNA, 23 bp, synthetic construct
  misc_feature 1..23: note = Synthetic
  source 1..23: mol_type = other DNA
tctttatcaaagacccaaagata

SEQ ID NO: 1372 - RNA, 23 nt, synthetic construct
  misc_feature 1..23: note = Synthetic
  source 1..23: mol_type = other RNA
ttctttatcaaagacccaaagat

SEQ ID NO: 1373 - DNA, 23 bp, synthetic construct
  misc_feature 1..23: note = Synthetic
  source 1..23: mol_type = other DNA
ttttctttatcaaagacccaaag

SEQ ID NO: 1374 - DNA, 23 bp, synthetic construct
  misc_feature 1..23: note = Synthetic
  source 1..23: mol_type = other DNA
attttctttatcaaagacccaaa

SEQ ID NO: 1375 - RNA, 23 nt, synthetic construct
  misc_feature 1..23: note = Synthetic
  source 1..23: mol_type = other RNA
tacaatgaacagggattcttttc

SEQ ID NO: 1376 - DNA, 23 bp, synthetic construct
  misc_feature 1..23: note = Synthetic
  source 1..23: mol_type = other DNA
ttacaatgaacagggattctttt

SEQ ID NO: 1377 - RNA, 23 nt, synthetic construct
  misc_feature 1..23: note = Synthetic
  source 1..23: mol_type = other RNA
attacaatgaacagggattcttt

SEQ ID NO: 1378 - RNA, 23 nt, synthetic construct
  misc_feature 1..23: note = Synthetic
  source 1..23: mol_type = other RNA
acttacaatgaacagggattctt

SEQ ID NO: 1379 - DNA, 23 bp, synthetic construct
  misc_feature 1..23: note = Synthetic
  source 1..23: mol_type = other DNA
taaaagtgcttacaatgaacagg

SEQ ID NO: 1380 - RNA, 23 nt, synthetic construct
  misc_feature 1..23: note = Synthetic
  source 1..23: mol_type = other RNA
ataaaagtgcttacaatgaacag

SEQ ID NO: 1381 - RNA, 23 nt, synthetic construct
  misc_feature 1..23: note = Synthetic
  source 1..23: mol_type = other RNA
acgtaaaagtgcttacaatgaac

SEQ ID NO: 1382 - RNA, 23 nt, synthetic construct
  misc_feature 1..23: note = Synthetic
  source 1..23: mol_type = other RNA
accgtaaaagtgcttacaatgaa

SEQ ID NO: 1383 - RNA, 23 nt, synthetic construct
  misc_feature 1..23: note = Synthetic
  source 1..23: mol_type = other RNA
ttcttggtaattgaagaccagca

SEQ ID NO: 1384 - DNA, 23 bp, synthetic construct
  misc_feature 1..23: note = Synthetic
  source 1..23: mol_type = other DNA
aattcttggtaattgaagaccag

SEQ ID NO: 1385 - RNA, 23 nt, synthetic construct
  misc_feature 1..23: note = Synthetic
  source 1..23: mol_type = other RNA
agaattcttggtaattgaagacc

SEQ ID NO: 1386 - DNA, 23 bp, synthetic construct
  misc_feature 1..23: note = Synthetic
  source 1..23: mol_type = other DNA
aagaattcttggtaattgaagac

SEQ ID NO: 1387 - DNA, 23 bp, synthetic construct
  misc_feature 1..23: note = Synthetic
  source 1..23: mol_type = other DNA
agagaattcttggtaattgaaga

SEQ ID NO: 1388 - RNA, 23 nt, synthetic construct
  misc_feature 1..23: note = Synthetic
  source 1..23: mol_type = other RNA
tggagaattcttggtaattgaag

SEQ ID NO: 1389 - RNA, 23 nt, synthetic construct
  misc_feature 1..23: note = Synthetic
  source 1..23: mol_type = other RNA
tttggagaattcttggtaattga

SEQ ID NO: 1390 - RNA, 23 nt, synthetic construct
  misc_feature 1..23: note = Synthetic
  source 1..23: mol_type = other RNA
attttggagaattcttggtaatt

SEQ ID NO: 1391 - RNA, 23 nt, synthetic construct
  misc_feature 1..23: note = Synthetic
  source 1..23: mol_type = other RNA
agcaatgattctgtacaatcatc

SEQ ID NO: 1392 - DNA, 23 bp, synthetic construct
  misc_feature 1..23: note = Synthetic
  source 1..23: mol_type = other DNA
agatcatgtcataagcaatgatt

SEQ ID NO: 1393 - RNA, 23 nt, synthetic construct
  misc_feature 1..23: note = Synthetic
  source 1..23: mol_type = other RNA
acgatcatgtcataagcaatgat

SEQ ID NO: 1394 - RNA, 23 nt, synthetic construct
  misc_feature 1..23: note = Synthetic
  source 1..23: mol_type = other RNA
agcgatcatgtcataagcaatga

SEQ ID NO: 1395 - DNA, 23 bp, synthetic construct
  misc_feature 1..23: note = Synthetic
  source 1..23: mol_type = other DNA
aagcgatcatgtcataagcaatg

SEQ ID NO: 1396 - RNA, 23 nt, synthetic construct
  misc_feature 1..23: note = Synthetic
  source 1..23: mol_type = other RNA
aaagcgatcatgtcataagcaat

SEQ ID NO: 1397 - RNA, 23 nt, synthetic construct
  misc_feature 1..23: note = Synthetic
  source 1..23: mol_type = other RNA
gaaagcgatcatgtcataagcaa

SEQ ID NO: 1398 - RNA, 23 nt, synthetic construct
  misc_feature 1..23: note = Synthetic
  source 1..23: mol_type = other RNA
agaaagcgatcatgtcataagca

SEQ ID NO: 1399 - RNA, 23 nt, synthetic construct
  misc_feature 1..23: note = Synthetic
  source 1..23: mol_type = other RNA
tagaaagcgatcatgtcataagc

SEQ ID NO: 1400 - RNA, 23 nt, synthetic construct
  misc_feature 1..23: note = Synthetic
  source 1..23: mol_type = other RNA
atagaaagcgatcatgtcataag

SEQ ID NO: 1401 - RNA, 23 nt, synthetic construct
  misc_feature 1..23: note = Synthetic
  source 1..23: mol_type = other RNA
tgtagaaagcgatcatgtcataa

SEQ ID NO: 1402 - RNA, 23 nt, synthetic construct
  misc_feature 1..23: note = Synthetic
  source 1..23: mol_type = other RNA
atgtagaaagcgatcatgtcata

SEQ ID NO: 1403 - DNA, 23 bp, synthetic construct
  misc_feature 1..23: note = Synthetic
  source 1..23: mol_type = other DNA
acagtgtagaaagcgatcatgtc

SEQ ID NO: 1404 - DNA, 23 bp, synthetic construct
  misc_feature 1..23: note = Synthetic
  source 1..23: mol_type = other DNA
atacagtgtagaaagcgatcatg

SEQ ID NO: 1405 - RNA, 23 nt, synthetic construct
  misc_feature 1..23: note = Synthetic
  source 1..23: mol_type = other RNA
aatacagtgtagaaagcgatcat

SEQ ID NO: 1406 - RNA, 23 nt, synthetic construct
  misc_feature 1..23: note = Synthetic
  source 1..23: mol_type = other RNA
taatacagtgtagaaagcgatca

SEQ ID NO: 1407 - RNA, 23 nt, synthetic construct
  misc_feature 1..23: note = Synthetic
  source 1..23: mol_type = other RNA
ataatacagtgtagaaagcgatc

SEQ ID NO: 1408 - RNA, 23 nt, synthetic construct
  misc_feature 1..23: note = Synthetic
  source 1..23: mol_type = other RNA
tgtaatacagtgtagaaagcgat

SEQ ID NO: 1409 - RNA, 23 nt, synthetic construct
  misc_feature 1..23: note = Synthetic
  source 1..23: mol_type = other RNA
tatgtaatacagtgtagaaagcg

SEQ ID NO: 1410 - DNA, 23 bp, synthetic construct
  misc_feature 1..23: note = Synthetic
  source 1..23: mol_type = other DNA
tttatgtaatacagtgtagaaag

SEQ ID NO: 1411 - RNA, 23 nt, synthetic construct
  misc_feature 1..23: note = Synthetic
  source 1..23: mol_type = other RNA
atttatgtaatacagtgtagaaa

SEQ ID NO: 1412 - RNA, 23 nt, synthetic construct
  misc_feature 1..23: note = Synthetic
  source 1..23: mol_type = other RNA
atggttaaagaaaattgaatctg

SEQ ID NO: 1413 - RNA, 23 nt, synthetic construct
  misc_feature 1..23: note = Synthetic
  source 1..23: mol_type = other RNA
ttcagactggttaaagaaaattg

SEQ ID NO: 1414 - RNA, 23 nt, synthetic construct
  misc_feature 1..23: note = Synthetic
  source 1..23: mol_type = other RNA
acttcagactggttaaagaaaat

SEQ ID NO: 1415 - RNA, 23 nt, synthetic construct
  misc_feature 1..23: note = Synthetic
  source 1..23: mol_type = other RNA
aaacttcagactggttaaagaaa

SEQ ID NO: 1416 - DNA, 23 bp, synthetic construct
  misc_feature 1..23: note = Synthetic
  source 1..23: mol_type = other DNA
gaaacttcagactggttaaagaa

SEQ ID NO: 1417 - DNA, 23 bp, synthetic construct
  misc_feature 1..23: note = Synthetic
  source 1..23: mol_type = other DNA
atatcataaatgaaacttcagac

SEQ ID NO: 1418 - RNA, 23 nt, synthetic construct
  misc_feature 1..23: note = Synthetic
  source 1..23: mol_type = other RNA
ttgtatcataaatgaaacttcag

SEQ ID NO: 1419 - DNA, 23 bp, synthetic construct
  misc_feature 1..23: note = Synthetic
  source 1..23: mol_type = other DNA
attatattgccacttccattttc

SEQ ID NO: 1420 - DNA, 23 bp, synthetic construct
  misc_feature 1..23: note = Synthetic
  source 1..23: mol_type = other DNA
accttatattgccacttccattt

SEQ ID NO: 1421 - RNA, 23 nt, synthetic construct
  misc_feature 1..23: note = Synthetic
  source 1..23: mol_type = other RNA
aaagaagggtttgtccaggcatg

SEQ ID NO: 1422 - RNA, 23 nt, synthetic construct
  misc_feature 1..23: note = Synthetic
  source 1..23: mol_type = other RNA
tgaagacacatcttaaaagaagg

SEQ ID NO: 1423 - RNA, 23 nt, synthetic construct
  misc_feature 1..23: note = Synthetic
  source 1..23: mol_type = other RNA
attgaagacacatcttaaaagaa

SEQ ID NO: 1424 - RNA, 23 nt, synthetic construct
  misc_feature 1..23: note = Synthetic
  source 1..23: mol_type = other RNA
aattgaagacacatcttaaaaga

SEQ ID NO: 1425 - RNA, 23 nt, synthetic construct
  misc_feature 1..23: note = Synthetic
  source 1..23: mol_type = other RNA
aaattgaagacacatcttaaaag

SEQ ID NO: 1426 - RNA, 23 nt, synthetic construct
  misc_feature 1..23: note = Synthetic
  source 1..23: mol_type = other RNA
caaattgaagacacatcttaaaa

SEQ ID NO: 1427 - DNA, 23 bp, synthetic construct
  misc_feature 1..23: note = Synthetic
  source 1..23: mol_type = other DNA
acaaattgaagacacatcttaaa

SEQ ID NO: 1428 - DNA, 23 bp, synthetic construct
  misc_feature 1..23: note = Synthetic
  source 1..23: mol_type = other DNA
tacaaattgaagacacatcttaa

SEQ ID NO: 1429 - RNA, 23 nt, synthetic construct
  misc_feature 1..23: note = Synthetic
  source 1..23: mol_type = other RNA
atacaaattgaagacacatctta

SEQ ID NO: 1430 - RNA, 23 nt, synthetic construct
  misc_feature 1..23: note = Synthetic
  source 1..23: mol_type = other RNA
ttatacaaattgaagacacatct

SEQ ID NO: 1431 - DNA, 23 bp, synthetic construct
  misc_feature 1..23: note = Synthetic
  source 1..23: mol_type = other DNA
attttatacaaattgaagacaca

SEQ ID NO: 1432 - DNA, 23 bp, synthetic construct
  misc_feature 1..23: note = Synthetic
  source 1..23: mol_type = other DNA
accattttatacaaattgaagac

SEQ ID NO: 1433 - RNA, 23 nt, synthetic construct
  misc_feature 1..23: note = Synthetic
  source 1..23: mol_type = other RNA
ttatttacatgaaaacaccattt

SEQ ID NO: 1434 - RNA, 23 nt, synthetic construct
  misc_feature 1..23: note = Synthetic
  source 1..23: mol_type = other RNA
tccaagaatgtatttatttacat

SEQ ID NO: 1435 - RNA, 21 nt, synthetic construct
  misc_feature 1..21: note = Synthetic
  source 1..21: mol_type = other RNA
tatgaagttcatcatcaaaaa

SEQ ID NO: 1436 - RNA, 21 nt, synthetic construct
  misc_feature 1..21: note = Synthetic
  source 1..21: mol_type = other RNA
ggctacgaaaatccaacctaa

SEQ ID NO: 1437 - RNA, 21 nt, synthetic construct
  misc_feature 1..21: note = Synthetic
  source 1..21: mol_type = other RNA
tttgtgtactgtaaagaatta

SEQ ID NO: 1438 - RNA, 21 nt, synthetic construct
  misc_feature 1..21: note = Synthetic
  source 1..21: mol_type = other RNA
tagtgcatgaatagattctca

SEQ ID NO: 1439 - RNA, 21 nt, synthetic construct
  misc_feature 1..21: note = Synthetic
  source 1..21: mol_type = other RNA
aaaatccaacctacaagttca

SEQ ID NO: 1440 - RNA, 23 nt, synthetic construct
  misc_feature 1..23: note = Synthetic
  source 1..23: mol_type = other RNA
tttttgatgatgaacttcatatc

SEQ ID NO: 1441 - DNA, 23 bp, synthetic construct
  misc_feature 1..23: note = Synthetic
  source 1..23: mol_type = other DNA
ttaggttggattttcgtagccgt

SEQ ID NO: 1442 - DNA, 23 bp, synthetic construct
  misc_feature 1..23: note = Synthetic
  source 1..23: mol_type = other DNA
taattctttacagtacacaaaac

SEQ ID NO: 1443 - DNA, 23 bp, synthetic construct
  misc_feature 1..23: note = Synthetic
  source 1..23: mol_type = other DNA
tgagaatctattcatgcactagt

SEQ ID NO: 1444 - DNA, 23 bp, synthetic construct
  misc_feature 1..23: note = Synthetic
  source 1..23: mol_type = other DNA
tgaacttgtaggttggattttcg

SEQ ID NO: 1445 - RNA, 23 nt, synthetic construct
  misc_feature 1..23: note = Synthetic
  source 1..23: mol_type = other RNA
gatatgaagttcatcatcaaaaa

SEQ ID NO: 1446 - RNA, 23 nt, synthetic construct
  misc_feature 1..23: note = Synthetic
  source 1..23: mol_type = other RNA
acggctacgaaaatccaacctaa

SEQ ID NO: 1447 - RNA, 23 nt, synthetic construct
  misc_feature 1..23: note = Synthetic
  source 1..23: mol_type = other RNA
gttttgtgtactgtaaagaatta

SEQ ID NO: 1448 - RNA, 23 nt, synthetic construct
  misc_feature 1..23: note = Synthetic
  source 1..23: mol_type = other RNA
actagtgcatgaatagattctca

SEQ ID NO: 1449 - RNA, 23 nt, synthetic construct
  misc_feature 1..23: note = Synthetic
  source 1..23: mol_type = other RNA
cgaaaatccaacctacaagttca

SEQ ID NO: 1450 - RNA, 21 nt, synthetic construct
  misc_feature 1..21: note = Synthetic
  source 1..21: mol_type = other RNA
tatgaagttcatcatcaaaaa

SEQ ID NO: 1451 - RNA, 21 nt, synthetic construct
  misc_feature 1..21: note = Synthetic
  source 1..21: mol_type = other RNA
ggctacgaaaatccaacctaa

SEQ ID NO: 1452 - RNA, 21 nt, synthetic construct
  misc_feature 1..21: note = Synthetic
  source 1..21: mol_type = other RNA
tttgtgtactgtaaagaatta

SEQ ID NO: 1453 - RNA, 21 nt, synthetic construct
  misc_feature 1..21: note = Synthetic
  source 1..21: mol_type = other RNA
tagtgcatgaatagattctca

SEQ ID NO: 1454 - RNA, 21 nt, synthetic construct
  misc_feature 1..21: note = Synthetic
  source 1..21: mol_type = other RNA
aaaatccaacctacaagttca

SEQ ID NO: 1455 - RNA, 23 nt, synthetic construct
  misc_feature 1..23: note = Synthetic
  source 1..23: mol_type = other RNA
tttttgatgatgaacttcatatc

SEQ ID NO: 1456 - DNA, 23 bp, synthetic construct
  misc_feature 1..23: note = Synthetic
  source 1..23: mol_type = other DNA
ttaggttggattttcgtagccgt

SEQ ID NO: 1457 - DNA, 23 bp, synthetic construct
  misc_feature 1..23: note = Synthetic
  source 1..23: mol_type = other DNA
taattctttacagtacacaaaac

SEQ ID NO: 1458 - DNA, 23 bp, synthetic construct
  misc_feature 1..23: note = Synthetic
  source 1..23: mol_type = other DNA
tgagaatctattcatgcactagt

SEQ ID NO: 1459 - DNA, 23 bp, synthetic construct
  misc_feature 1..23: note = Synthetic
  source 1..23: mol_type = other DNA
tgaacttgtaggttggattttcg

SEQ ID NO: 1460 - RNA, 21 nt, synthetic construct
  misc_feature 1..21: note = Synthetic
  source 1..21: mol_type = other RNA
aaagagcaaaactattcagat

SEQ ID NO: 1461 - RNA, 21 nt, synthetic construct
  misc_feature 1..21: note = Synthetic
  source 1..21: mol_type = other RNA
ttggccaacatgattagtgat

SEQ ID NO: 1462 - RNA, 21 nt, synthetic construct
  misc_feature 1..21: note = Synthetic
  source 1..21: mol_type = other RNA
tctgggttgacaaatatcaat

SEQ ID NO: 1463 - RNA, 21 nt, synthetic construct
  misc_feature 1..21: note = Synthetic
  source 1..21: mol_type = other RNA
tttatgatttactcattatct

SEQ ID NO: 1464 - RNA, 21 nt, synthetic construct
  misc_feature 1..21: note = Synthetic
  source 1..21: mol_type = other RNA
atgcctgaacttgaattaatt

SEQ ID NO: 1465 - RNA, 21 nt, synthetic construct
  misc_feature 1..21: note = Synthetic
  source 1..21: mol_type = other RNA
agatgcctgaacttgaattat

SEQ ID NO: 1466 - RNA, 21 nt, synthetic construct
  misc_feature 1..21: note = Synthetic
  source 1..21: mol_type = other RNA
gcctgaacttgaattaatcct

SEQ ID NO: 1467 - RNA, 21 nt, synthetic construct
  misc_feature 1..21: note = Synthetic
  source 1..21: mol_type = other RNA
gtggtttgtgacccaattaat

SEQ ID NO: 1468 - RNA, 21 nt, synthetic construct
  misc_feature 1..21: note = Synthetic
  source 1..21: mol_type = other RNA
cagatgctttagagagatttt

SEQ ID NO: 1469 - RNA, 21 nt, synthetic construct
  misc_feature 1..21: note = Synthetic
  source 1..21: mol_type = other RNA
tcttgcctaagtattcctttt

SEQ ID NO: 1470 - RNA, 21 nt, synthetic construct
  misc_feature 1..21: note = Synthetic
  source 1..21: mol_type = other RNA
ttgctgcttctgctatatttt

SEQ ID NO: 1471 - RNA, 23 nt, synthetic construct
  misc_feature 1..23: note = Synthetic
  source 1..23: mol_type = other RNA
atctgaatagttttgctctttct

SEQ ID NO: 1472 - RNA, 23 nt, synthetic construct
  misc_feature 1..23: note = Synthetic
  source 1..23: mol_type = other RNA
atcactaatcatgttggccaaga

SEQ ID NO: 1473 - RNA, 23 nt, synthetic construct
  misc_feature 1..23: note = Synthetic
  source 1..23: mol_type = other RNA
attgatatttgtcaacccagaac

SEQ ID NO: 1474 - RNA, 23 nt, synthetic construct
  misc_feature 1..23: note = Synthetic
  source 1..23: mol_type = other RNA
agataatgagtaaatcataaaac

SEQ ID NO: 1475 - RNA, 23 nt, synthetic construct
  misc_feature 1..23: note = Synthetic
  source 1..23: mol_type = other RNA
aattaattcaagttcaggcatct

SEQ ID NO: 1476 - RNA, 23 nt, synthetic construct
  misc_feature 1..23: note = Synthetic
  source 1..23: mol_type = other RNA
ataattcaagttcaggcatctac

SEQ ID NO: 1477 - RNA, 23 nt, synthetic construct
  misc_feature 1..23: note = Synthetic
  source 1..23: mol_type = other RNA
aggattaattcaagttcaggcat

SEQ ID NO: 1478 - RNA, 23 nt, synthetic construct
  misc_feature 1..23: note = Synthetic
  source 1..23: mol_type = other RNA
attaattgggtcacaaaccacaa

SEQ ID NO: 1479 - RNA, 23 nt, synthetic construct
  misc_feature 1..23: note = Synthetic
  source 1..23: mol_type = other RNA
aaaatctctctaaagcatctgaa

SEQ ID NO: 1480 - RNA, 23 nt, synthetic construct
  misc_feature 1..23: note = Synthetic
  source 1..23: mol_type = other RNA
aaaaggaatacttaggcaagaga

SEQ ID NO: 1481 - RNA, 23 nt, synthetic construct
  misc_feature 1..23: note = Synthetic
  source 1..23: mol_type = other RNA
aaaatatagcagaagcagcaatc

SEQ ID NO: 1482 - RNA, 23 nt, synthetic construct
  misc_feature 1..23: note = Synthetic
  source 1..23: mol_type = other RNA
agaaagagcaaaactattcagat

SEQ ID NO: 1483 - RNA, 23 nt, synthetic construct
  misc_feature 1..23: note = Synthetic
  source 1..23: mol_type = other RNA
tcttggccaacatgattagtgaa

SEQ ID NO: 1484 - RNA, 23 nt, synthetic construct
  misc_feature 1..23: note = Synthetic
  source 1..23: mol_type = other RNA
gttctgggttgacaaatatcaag

SEQ ID NO: 1485 - RNA, 23 nt, synthetic construct
  misc_feature 1..23: note = Synthetic
  source 1..23: mol_type = other RNA
gttttatgatttactcattatcg

SEQ ID NO: 1486 - RNA, 23 nt, synthetic construct
  misc_feature 1..23: note = Synthetic
  source 1..23: mol_type = other RNA
agatgcctgaacttgaattaatc

SEQ ID NO: 1487 - RNA, 23 nt, synthetic construct
  misc_feature 1..23: note = Synthetic
  source 1..23: mol_type = other RNA
gtagatgcctgaacttgaattaa

SEQ ID NO: 1488 - RNA, 23 nt, synthetic construct
  misc_feature 1..23: note = Synthetic
  source 1..23: mol_type = other RNA
atgcctgaacttgaattaatcca

SEQ ID NO: 1489 - RNA, 23 nt, synthetic construct
  misc_feature 1..23: note = Synthetic
  source 1..23: mol_type = other RNA
ttgtggtttgtgacccaattaag

SEQ ID NO: 1490 - RNA, 23 nt, synthetic construct
  misc_feature 1..23: note = Synthetic
  source 1..23: mol_type = other RNA
ttcagatgctttagagagatttt

SEQ ID NO: 1491 - RNA, 23 nt, synthetic construct
  misc_feature 1..23: note = Synthetic
  source 1..23: mol_type = other RNA
tctcttgcctaagtattcctttc

SEQ ID NO: 1492 - RNA, 23 nt, synthetic construct
  misc_feature 1..23: note = Synthetic
  source 1..23: mol_type = other RNA
gattgctgcttctgctatatttg

SEQ ID NO: 1493 - RNA, 21 nt, synthetic construct
  misc_feature 1..21: note = Synthetic
  source 1..21: mol_type = other RNA
aaagagcaaaactattcagat

SEQ ID NO: 1494 - RNA, 21 nt, synthetic construct
  misc_feature 1..21: note = Synthetic
  source 1..21: mol_type = other RNA
ttggccaacatgattagtgat

SEQ ID NO: 1495 - RNA, 21 nt, synthetic construct
  misc_feature 1..21: note = Synthetic
  source 1..21: mol_type = other RNA
tctgggttgacaaatatcaat

SEQ ID NO: 1496 - RNA, 21 nt, synthetic construct
  misc_feature 1..21: note = Synthetic
  source 1..21: mol_type = other RNA
tttatgatttactcattatct

SEQ ID NO: 1497 - RNA, 21 nt, synthetic construct
  misc_feature 1..21: note = Synthetic
  source 1..21: mol_type = other RNA
atgcctgaacttgaattaatt

SEQ ID NO: 1498 - RNA, 21 nt, synthetic construct
  misc_feature 1..21: note = Synthetic
  source 1..21: mol_type = other RNA
agatgcctgaacttgaattat

SEQ ID NO: 1499 - RNA, 21 nt, synthetic construct
  misc_feature 1..21: note = Synthetic
  source 1..21: mol_type = other RNA
gcctgaacttgaattaatcct

SEQ ID NO: 1500 - RNA, 21 nt, synthetic construct
  misc_feature 1..21: note = Synthetic
  source 1..21: mol_type = other RNA
gtggtttgtgacccaattaat

SEQ ID NO: 1501 - RNA, 21 nt, synthetic construct
  misc_feature 1..21: note = Synthetic
  source 1..21: mol_type = other RNA
cagatgctttagagagatttt

SEQ ID NO: 1502 - RNA, 21 nt, synthetic construct
  misc_feature 1..21: note = Synthetic
  source 1..21: mol_type = other RNA
tcttgcctaagtattcctttt

SEQ ID NO: 1503 - RNA, 21 nt, synthetic construct
  misc_feature 1..21: note = Synthetic
  source 1..21: mol_type = other RNA
ttgctgcttctgctatatttt

SEQ ID NO: 1504 - RNA, 23 nt, synthetic construct
  misc_feature 1..23: note = Synthetic
  source 1..23: mol_type = other RNA
atctgaatagttttgctctttct

SEQ ID NO: 1505 - RNA, 23 nt, synthetic construct
  misc_feature 1..23: note = Synthetic
  source 1..23: mol_type = other RNA
atcactaatcatgttggccaaga

SEQ ID NO: 1506 - RNA, 23 nt, synthetic construct
  misc_feature 1..23: note = Synthetic
  source 1..23: mol_type = other RNA
attgatatttgtcaacccagaac

SEQ ID NO: 1507 - RNA, 23 nt, synthetic construct
  misc_feature 1..23: note = Synthetic
  source 1..23: mol_type = other RNA
agataatgagtaaatcataaaac

SEQ ID NO: 1508 - RNA, 23 nt, synthetic construct
  misc_feature 1..23: note = Synthetic
  source 1..23: mol_type = other RNA
aattaattcaagttcaggcatct

SEQ ID NO: 1509 - RNA, 23 nt, synthetic construct
  misc_feature 1..23: note = Synthetic
  source 1..23: mol_type = other RNA
ataattcaagttcaggcatctac

SEQ ID NO: 1510 - RNA, 23 nt, synthetic construct
  misc_feature 1..23: note = Synthetic
  source 1..23: mol_type = other RNA
aggattaattcaagttcaggcat

SEQ ID NO: 1511 - RNA, 23 nt, synthetic construct
  misc_feature 1..23: note = Synthetic
  source 1..23: mol_type = other RNA
attaattgggtcacaaaccacaa

SEQ ID NO: 1512 - RNA, 23 nt, synthetic construct
  misc_feature 1..23: note = Synthetic
  source 1..23: mol_type = other RNA
aaaatctctctaaagcatctgaa

SEQ ID NO: 1513 - RNA, 23 nt, synthetic construct
  misc_feature 1..23: note = Synthetic
  source 1..23: mol_type = other RNA
aaaaggaatacttaggcaagaga

SEQ ID NO: 1514 - RNA, 23 nt, synthetic construct
  misc_feature 1..23: note = Synthetic
  source 1..23: mol_type = other RNA
aaaatatagcagaagcagcaatc

SEQ ID NO: 1515 - RNA, 21 nt, synthetic construct
  misc_feature 1..21: note = Synthetic
  source 1..21: mol_type = other RNA
cgctttctacactgtattaca

SEQ ID NO: 1516 - RNA, 21 nt, synthetic construct
  misc_feature 1..21: note = Synthetic
  source 1..21: mol_type = other RNA
gctttctacactgtattacaa

SEQ ID NO: 1517 - RNA, 21 nt, synthetic construct
  misc_feature 1..21: note = Synthetic
  source 1..21: mol_type = other RNA
ttctacactgtattacataaa

SEQ ID NO: 1518 - RNA, 21 nt, synthetic construct
  misc_feature 1..21: note = Synthetic
  source 1..21: mol_type = other RNA
tttctacactgtattacataa

SEQ ID NO: 1519 - RNA, 21 nt, synthetic construct
  misc_feature 1..21: note = Synthetic
  source 1..21: mol_type = other RNA
atttagctgtatcaaactaga

SEQ ID NO: 1520 - RNA, 21 nt, synthetic construct
  misc_feature 1..21: note = Synthetic
  source 1..21: mol_type = other RNA
ttcctgatcactatgcattta

SEQ ID NO: 1521 - RNA, 21 nt, synthetic construct
  misc_feature 1..21: note = Synthetic
  source 1..21: mol_type = other RNA
gtgctgtaacacaagtagata

SEQ ID NO: 1522 - RNA, 21 nt, synthetic construct
  misc_feature 1..21: note = Synthetic
  source 1..21: mol_type = other RNA
tttagctgtatcaaactagta

SEQ ID NO: 1523 - RNA, 21 nt, synthetic construct
  misc_feature 1..21: note = Synthetic
  source 1..21: mol_type = other RNA
tttcctgatcactatgcatta

SEQ ID NO: 1524 - RNA, 21 nt, synthetic construct
  misc_feature 1..21: note = Synthetic
  source 1..21: mol_type = other RNA
aatgggttttgtgtactgtaa

SEQ ID NO: 1525 - RNA, 21 nt, synthetic construct
  misc_feature 1..21: note = Synthetic
  source 1..21: mol_type = other RNA
attgtacagaatcattgctta

SEQ ID NO: 1526 - RNA, 21 nt, synthetic construct
  misc_feature 1..21: note = Synthetic
  source 1..21: mol_type = other RNA
ttgtacagaatcattgcttaa

SEQ ID NO: 1527 - RNA, 21 nt, synthetic construct
  misc_feature 1..21: note = Synthetic
  source 1..21: mol_type = other RNA
ttactgtacagattgctgcta

SEQ ID NO: 1528 - RNA, 21 nt, synthetic construct
  misc_feature 1..21: note = Synthetic
  source 1..21: mol_type = other RNA
atatgctgaagaagtacgtca

SEQ ID NO: 1529 - RNA, 21 nt, synthetic construct
  misc_feature 1..21: note = Synthetic
  source 1..21: mol_type = other RNA
accattgcttcactacccata

SEQ ID NO: 1530 - RNA, 21 nt, synthetic construct
  misc_feature 1..21: note = Synthetic
  source 1..21: mol_type = other RNA
ctgtgctgtaacacaagtaga

SEQ ID NO: 1531 - RNA, 21 nt, synthetic construct
  misc_feature 1..21: note = Synthetic
  source 1..21: mol_type = other RNA
tgctgtaacacaagtagatga

SEQ ID NO: 1532 - RNA, 21 nt, synthetic construct
  misc_feature 1..21: note = Synthetic
  source 1..21: mol_type = other RNA
acagctgtgctgtaacacaaa

SEQ ID NO: 1533 - RNA, 21 nt, synthetic construct
  misc_feature 1..21: note = Synthetic
  source 1..21: mol_type = other RNA
gctgtaacacaagtagatgca

SEQ ID NO: 1534 - RNA, 21 nt, synthetic construct
  misc_feature 1..21: note = Synthetic
  source 1..21: mol_type = other RNA
tcaaactagtgcatgaataga

SEQ ID NO: 1535 - RNA, 21 nt, synthetic construct
  misc_feature 1..21: note = Synthetic
  source 1..21: mol_type = other RNA
caaactagtgcatgaatagaa

SEQ ID NO: 1536 - RNA, 21 nt, synthetic construct
  misc_feature 1..21: note = Synthetic
  source 1..21: mol_type = other RNA
tgcaggatgattgtacagaaa

SEQ ID NO: 1537 - RNA, 21 nt, synthetic construct
  misc_feature 1..21: note = Synthetic
  source 1..21: mol_type = other RNA
gcaggatgattgtacagaata

SEQ ID NO: 1538 - RNA, 21 nt, synthetic construct
  misc_feature 1..21: note = Synthetic
  source 1..21: mol_type = other RNA
caggatgattgtacagaatca

SEQ ID NO: 1539 - RNA, 21 nt, synthetic construct
  misc_feature 1..21: note = Synthetic
  source 1..21: mol_type = other RNA
tatcaaactagtgcatgaata

SEQ ID NO: 1540 - RNA, 21 nt, synthetic construct
  misc_feature 1..21: note = Synthetic
  source 1..21: mol_type = other RNA
tttgtgcctgttttatgtgca

SEQ ID NO: 1541 - RNA, 21 nt, synthetic construct
  misc_feature 1..21: note = Synthetic
  source 1..21: mol_type = other RNA
ttgtgcctgttttatgtgcaa

SEQ ID NO: 1542 - RNA, 21 nt, synthetic construct
  misc_feature 1..21: note = Synthetic
  source 1..21: mol_type = other RNA
ctgcaggatgattgtacagaa

SEQ ID NO: 1543 - RNA, 21 nt, synthetic construct
  misc_feature 1..21: note = Synthetic
  source 1..21: mol_type = other RNA
caggtcatgagagaatgggaa

SEQ ID NO: 1544 - RNA, 21 nt, synthetic construct
  misc_feature 1..21: note = Synthetic
  source 1..21: mol_type = other RNA
tatgtgcacacattaggcata

SEQ ID NO: 1545 - RNA, 21 nt, synthetic construct
  misc_feature 1..21: note = Synthetic
  source 1..21: mol_type = other RNA
tgtgcacacattaggcattga

SEQ ID NO: 1546 - RNA, 21 nt, synthetic construct
  misc_feature 1..21: note = Synthetic
  source 1..21: mol_type = other RNA
ggatgattgtacagaatcata

SEQ ID NO: 1547 - RNA, 21 nt, synthetic construct
  misc_feature 1..21: note = Synthetic
  source 1..21: mol_type = other RNA
accatccagaactggtgcaaa

SEQ ID NO: 1548 - RNA, 21 nt, synthetic construct
  misc_feature 1..21: note = Synthetic
  source 1..21: mol_type = other RNA
tatgctgaagaagtacgtcca

SEQ ID NO: 1549 - RNA, 21 nt, synthetic construct
  misc_feature 1..21: note = Synthetic
  source 1..21: mol_type = other RNA
atgctgaagaagtacgtccga

SEQ ID NO: 1550 - RNA, 21 nt, synthetic construct
  misc_feature 1..21: note = Synthetic
  source 1..21: mol_type = other RNA
aaaccattgcttcactaccca

SEQ ID NO: 1551 - RNA, 21 nt, synthetic construct
  misc_feature 1..21: note = Synthetic
  source 1..21: mol_type = other RNA
aaccattgcttcactacccaa

SEQ ID NO: 1552 - RNA, 21 nt, synthetic construct
  misc_feature 1..21: note = Synthetic
  source 1..21: mol_type = other RNA
caccgagagagaatgtcccaa

SEQ ID NO: 1553 - RNA, 21 nt, synthetic construct
  misc_feature 1..21: note = Synthetic
  source 1..21: mol_type = other RNA
gttgtatattattcttgtgga

SEQ ID NO: 1554 - RNA, 21 nt, synthetic construct
  misc_feature 1..21: note = Synthetic
  source 1..21: mol_type = other RNA
ttatgtgcacacattaggcaa

SEQ ID NO: 1555 - RNA, 21 nt, synthetic construct
  misc_feature 1..21: note = Synthetic
  source 1..21: mol_type = other RNA
atgtgcacacattaggcatta

SEQ ID NO: 1556 - RNA, 21 nt, synthetic construct
  misc_feature 1..21: note = Synthetic
  source 1..21: mol_type = other RNA
gtgcacacattaggcattgaa

SEQ ID NO: 1557 - RNA, 21 nt, synthetic construct
  misc_feature 1..21: note = Synthetic
  source 1..21: mol_type = other RNA
tgattgtacagaatcattgca

SEQ ID NO: 1558 - RNA, 21 nt, synthetic construct
  misc_feature 1..21: note = Synthetic
  source 1..21: mol_type = other RNA
gcttcactacccatcggtgta

SEQ ID NO: 1559 - RNA, 21 nt, synthetic construct
  misc_feature 1..21: note = Synthetic
  source 1..21: mol_type = other RNA
ttttatgtgcacacattagga

SEQ ID NO: 1560 - RNA, 21 nt, synthetic construct
  misc_feature 1..21: note = Synthetic
  source 1..21: mol_type = other RNA
cgctttctacactgtattaca

SEQ ID NO: 1561 - RNA, 21 nt, synthetic construct
  misc_feature 1..21: note = Synthetic
  source 1..21: mol_type = other RNA
gctttctacactgtattacaa

SEQ ID NO: 1562 - RNA, 21 nt, synthetic construct
  misc_feature 1..21: note = Synthetic
  source 1..21: mol_type = other RNA
ttctacactgtattacataaa

SEQ ID NO: 1563 - RNA, 21 nt, synthetic construct
  misc_feature 1..21: note = Synthetic
  source 1..21: mol_type = other RNA
tttctacactgtattacataa

SEQ ID NO: 1564 - RNA, 21 nt, synthetic construct
  misc_feature 1..21: note = Synthetic
  source 1..21: mol_type = other RNA
atttagctgtatcaaactaga

SEQ ID NO: 1565 - RNA, 21 nt, synthetic construct
  misc_feature 1..21: note = Synthetic
  source 1..21: mol_type = other RNA
ttcctgatcactatgcattta

SEQ ID NO: 1566 - RNA, 21 nt, synthetic construct
  misc_feature 1..21: note = Synthetic
  source 1..21: mol_type = other RNA
gtgctgtaacacaagtagata

SEQ ID NO: 1567 - RNA, 21 nt, synthetic construct
  misc_feature 1..21: note = Synthetic
  source 1..21: mol_type = other RNA
tttagctgtatcaaactagta

SEQ ID NO: 1568 - RNA, 21 nt, synthetic construct
  misc_feature 1..21: note = Synthetic
  source 1..21: mol_type = other RNA
tttcctgatcactatgcatta

SEQ ID NO: 1569 - RNA, 21 nt, synthetic construct
  misc_feature 1..21: note = Synthetic
  source 1..21: mol_type = other RNA
aatgggttttgtgtactgtaa

SEQ ID NO: 1570 - RNA, 21 nt, synthetic construct
  misc_feature 1..21: note = Synthetic
  source 1..21: mol_type = other RNA
ttactgtacagattgctgcta

SEQ ID NO: 1571 - RNA, 21 nt, synthetic construct
  misc_feature 1..21: note = Synthetic
  source 1..21: mol_type = other RNA
attgtacagaatcattgctta

SEQ ID NO: 1572 - RNA, 21 nt, synthetic construct
  misc_feature 1..21: note = Synthetic
  source 1..21: mol_type = other RNA
ttgtacagaatcattgcttaa

SEQ ID NO: 1573 - RNA, 21 nt, synthetic construct
  misc_feature 1..21: note = Synthetic
  source 1..21: mol_type = other RNA
atatgctgaagaagtacgtca

SEQ ID NO: 1574 - RNA, 21 nt, synthetic construct
  misc_feature 1..21: note = Synthetic
  source 1..21: mol_type = other RNA
accattgcttcactacccata

SEQ ID NO: 1575 - RNA, 21 nt, synthetic construct
  misc_feature 1..21: note = Synthetic
  source 1..21: mol_type = other RNA
ctgtgctgtaacacaagtaga

SEQ ID NO: 1576 - RNA, 21 nt, synthetic construct
  misc_feature 1..21: note = Synthetic
  source 1..21: mol_type = other RNA
tgctgtaacacaagtagatga

SEQ ID NO: 1577 - RNA, 21 nt, synthetic construct
  misc_feature 1..21: note = Synthetic
  source 1..21: mol_type = other RNA
acagctgtgctgtaacacaaa

SEQ ID NO: 1578 - RNA, 21 nt, synthetic construct
  misc_feature 1..21: note = Synthetic
  source 1..21: mol_type = other RNA
gctgtaacacaagtagatgca

SEQ ID NO: 1579 - RNA, 21 nt, synthetic construct
  misc_feature 1..21: note = Synthetic
  source 1..21: mol_type = other RNA
tcaaactagtgcatgaataga

SEQ ID NO: 1580 - RNA, 21 nt, synthetic construct
  misc_feature 1..21: note = Synthetic
  source 1..21: mol_type = other RNA
caaactagtgcatgaatagaa

SEQ ID NO: 1581 - RNA, 21 nt, synthetic construct
  misc_feature 1..21: note = Synthetic
  source 1..21: mol_type = other RNA
tgcaggatgattgtacagaaa

SEQ ID NO: 1582 - RNA, 21 nt, synthetic construct
  misc_feature 1..21: note = Synthetic
  source 1..21: mol_type = other RNA
gcaggatgattgtacagaata

SEQ ID NO: 1583 - RNA, 21 nt, synthetic construct
  misc_feature 1..21: note = Synthetic
  source 1..21: mol_type = other RNA
caggatgattgtacagaatca

SEQ ID NO: 1584 - RNA, 21 nt, synthetic construct
  misc_feature 1..21: note = Synthetic
  source 1..21: mol_type = other RNA
tatcaaactagtgcatgaata

SEQ ID NO: 1585 - RNA, 21 nt, synthetic construct
  misc_feature 1..21: note = Synthetic
  source 1..21: mol_type = other RNA
tttgtgcctgttttatgtgca

SEQ ID NO: 1586 - RNA, 21 nt, synthetic construct
  misc_feature 1..21: note = Synthetic
  source 1..21: mol_type = other RNA
ttgtgcctgttttatgtgcaa

SEQ ID NO: 1587 - RNA, 21 nt, synthetic construct
  misc_feature 1..21: note = Synthetic
  source 1..21: mol_type = other RNA
ctgcaggatgattgtacagaa

SEQ ID NO: 1588 - RNA, 21 nt, synthetic construct
  misc_feature 1..21: note = Synthetic
  source 1..21: mol_type = other RNA
caggtcatgagagaatgggaa

SEQ ID NO: 1589 - RNA, 21 nt, synthetic construct
  misc_feature 1..21: note = Synthetic
  source 1..21: mol_type = other RNA
tatgctgaagaagtacgtcca

SEQ ID NO: 1590 - RNA, 21 nt, synthetic construct
  misc_feature 1..21: note = Synthetic
  source 1..21: mol_type = other RNA
atgctgaagaagtacgtccga

SEQ ID NO: 1591 - RNA, 21 nt, synthetic construct
  misc_feature 1..21: note = Synthetic
  source 1..21: mol_type = other RNA
aaaccattgcttcactaccca

SEQ ID NO: 1592 - RNA, 21 nt, synthetic construct
  misc_feature 1..21: note = Synthetic
  source 1..21: mol_type = other RNA
aaccattgcttcactacccaa

SEQ ID NO: 1593 - RNA, 21 nt, synthetic construct
  misc_feature 1..21: note = Synthetic
  source 1..21: mol_type = other RNA
tatgtgcacacattaggcata

SEQ ID NO: 1594 - RNA, 21 nt, synthetic construct
  misc_feature 1..21: note = Synthetic
  source 1..21: mol_type = other RNA
tgtgcacacattaggcattga

SEQ ID NO: 1595 - RNA, 21 nt, synthetic construct
  misc_feature 1..21: note = Synthetic
  source 1..21: mol_type = other RNA
ggatgattgtacagaatcata

SEQ ID NO: 1596 - RNA, 21 nt, synthetic construct
  misc_feature 1..21: note = Synthetic
  source 1..21: mol_type = other RNA
accatccagaactggtgcaaa

SEQ ID NO: 1597 - RNA, 21 nt, synthetic construct
  misc_feature 1..21: note = Synthetic
  source 1..21: mol_type = other RNA
caccgagagagaatgtcccaa

SEQ ID NO: 1598 - RNA, 21 nt, synthetic construct
  misc_feature 1..21: note = Synthetic
  source 1..21: mol_type = other RNA
gttgtatattattcttgtgga

SEQ ID NO: 1599 - RNA, 21 nt, synthetic construct
  misc_feature 1..21: note = Synthetic
  source 1..21: mol_type = other RNA
ttatgtgcacacattaggcaa

SEQ ID NO: 1600 - RNA, 21 nt, synthetic construct
  misc_feature 1..21: note = Synthetic
  source 1..21: mol_type = other RNA
atgtgcacacattaggcatta

SEQ ID NO: 1601 - RNA, 21 nt, synthetic construct
  misc_feature 1..21: note = Synthetic
  source 1..21: mol_type = other RNA
gtgcacacattaggcattgaa

SEQ ID NO: 1602 - RNA, 21 nt, synthetic construct
  misc_feature 1..21: note = Synthetic
  source 1..21: mol_type = other RNA
tgattgtacagaatcattgca

SEQ ID NO: 1603 - RNA, 21 nt, synthetic construct
  misc_feature 1..21: note = Synthetic
  source 1..21: mol_type = other RNA
gcttcactacccatcggtgta

SEQ ID NO: 1604 - RNA, 21 nt, synthetic construct
  misc_feature 1..21: note = Synthetic
  source 1..21: mol_type = other RNA
ttttatgtgcacacattagga

SEQ ID NO: 1605 - RNA, 23 nt, synthetic construct
  misc_feature 1..23: note = Synthetic
  source 1..23: mol_type = other RNA
tgtaatacagtgtagaaagcgat

SEQ ID NO: 1606 - RNA, 23 nt, synthetic construct
  misc_feature 1..23: note = Synthetic
  source 1..23: mol_type = other RNA
ttgtaatacagtgtagaaagcga

SEQ ID NO: 1607 - RNA, 23 nt, synthetic construct
  misc_feature 1..23: note = Synthetic
  source 1..23: mol_type = other RNA
tttatgtaatacagtgtagaaag

SEQ ID NO: 1608 - RNA, 23 nt, synthetic construct
  misc_feature 1..23: note = Synthetic
  source 1..23: mol_type = other RNA
ttatgtaatacagtgtagaaagc

SEQ ID NO: 1609 - RNA, 23 nt, synthetic construct
  misc_feature 1..23: note = Synthetic
  source 1..23: mol_type = other RNA
tctagtttgatacagctaaattc

SEQ ID NO: 1610 - RNA, 23 nt, synthetic construct
  misc_feature 1..23: note = Synthetic
  source 1..23: mol_type = other RNA
taaatgcatagtgatcaggaaag

SEQ ID NO: 1611 - RNA, 23 nt, synthetic construct
  misc_feature 1..23: note = Synthetic
  source 1..23: mol_type = other RNA
tatctacttgtgttacagcacag

SEQ ID NO: 1612 - RNA, 23 nt, synthetic construct
  misc_feature 1..23: note = Synthetic
  source 1..23: mol_type = other RNA
tactagtttgatacagctaaatt

SEQ ID NO: 1613 - RNA, 23 nt, synthetic construct
  misc_feature 1..23: note = Synthetic
  source 1..23: mol_type = other RNA
taatgcatagtgatcaggaaagg

SEQ ID NO: 1614 - RNA, 23 nt, synthetic construct
  misc_feature 1..23: note = Synthetic
  source 1..23: mol_type = other RNA
ttacagtacacaaaacccattaa

SEQ ID NO: 1615 - RNA, 23 nt, synthetic construct
  misc_feature 1..23: note = Synthetic
  source 1..23: mol_type = other RNA
taagcaatgattctgtacaatca

SEQ ID NO: 1616 - RNA, 23 nt, synthetic construct
  misc_feature 1..23: note = Synthetic
  source 1..23: mol_type = other RNA
ttaagcaatgattctgtacaatc

SEQ ID NO: 1617 - RNA, 23 nt, synthetic construct
  misc_feature 1..23: note = Synthetic
  source 1..23: mol_type = other RNA
tagcagcaatctgtacagtaaaa

SEQ ID NO: 1618 - RNA, 23 nt, synthetic construct
  misc_feature 1..23: note = Synthetic
  source 1..23: mol_type = other RNA
tgacgtacttcttcagcatattg

SEQ ID NO: 1619 - RNA, 23 nt, synthetic construct
  misc_feature 1..23: note = Synthetic
  source 1..23: mol_type = other RNA
tatgggtagtgaagcaatggttt

SEQ ID NO: 1620 - RNA, 23 nt, synthetic construct
  misc_feature 1..23: note = Synthetic
  source 1..23: mol_type = other RNA
tctacttgtgttacagcacagct

SEQ ID NO: 1621 - RNA, 23 nt, synthetic construct
  misc_feature 1..23: note = Synthetic
  source 1..23: mol_type = other RNA
tcatctacttgtgttacagcaca

SEQ ID NO: 1622 - RNA, 23 nt, synthetic construct
  misc_feature 1..23: note = Synthetic
  source 1..23: mol_type = other RNA
tttgtgttacagcacagctgtca

SEQ ID NO: 1623 - RNA, 23 nt, synthetic construct
  misc_feature 1..23: note = Synthetic
  source 1..23: mol_type = other RNA
tgcatctacttgtgttacagcac

SEQ ID NO: 1624 - RNA, 23 nt, synthetic construct
  misc_feature 1..23: note = Synthetic
  source 1..23: mol_type = other RNA
tctattcatgcactagtttgata

SEQ ID NO: 1625 - RNA, 23 nt, synthetic construct
  misc_feature 1..23: note = Synthetic
  source 1..23: mol_type = other RNA
ttctattcatgcactagtttgat

SEQ ID NO: 1626 - RNA, 23 nt, synthetic construct
  misc_feature 1..23: note = Synthetic
  source 1..23: mol_type = other RNA
tttctgtacaatcatcctgcaga

SEQ ID NO: 1627 - RNA, 23 nt, synthetic construct
  misc_feature 1..23: note = Synthetic
  source 1..23: mol_type = other RNA
tattctgtacaatcatcctgcag

SEQ ID NO: 1628 - RNA, 23 nt, synthetic construct
  misc_feature 1..23: note = Synthetic
  source 1..23: mol_type = other RNA
tgattctgtacaatcatcctgca

SEQ ID NO: 1629 - RNA, 23 nt, synthetic construct
  misc_feature 1..23: note = Synthetic
  source 1..23: mol_type = other RNA
tattcatgcactagtttgataca

SEQ ID NO: 1630 - RNA, 23 nt, synthetic construct
  misc_feature 1..23: note = Synthetic
  source 1..23: mol_type = other RNA
tgcacataaaacaggcacaaaga

SEQ ID NO: 1631 - RNA, 23 nt, synthetic construct
  misc_feature 1..23: note = Synthetic
  source 1..23: mol_type = other RNA
ttgcacataaaacaggcacaaag

SEQ ID NO: 1632 - RNA, 23 nt, synthetic construct
  misc_feature 1..23: note = Synthetic
  source 1..23: mol_type = other RNA
ttctgtacaatcatcctgcagaa

SEQ ID NO: 1633 - RNA, 23 nt, synthetic construct
  misc_feature 1..23: note = Synthetic
  source 1..23: mol_type = other RNA
ttcccattctctcatgacctggg

SEQ ID NO: 1634 - RNA, 23 nt, synthetic construct
  misc_feature 1..23: note = Synthetic
  source 1..23: mol_type = other RNA
tatgcctaatgtgtgcacataaa

SEQ ID NO: 1635 - RNA, 23 nt, synthetic construct
  misc_feature 1..23: note = Synthetic
  source 1..23: mol_type = other RNA
tcaatgcctaatgtgtgcacata

SEQ ID NO: 1636 - RNA, 23 nt, synthetic construct
  misc_feature 1..23: note = Synthetic
  source 1..23: mol_type = other RNA
tatgattctgtacaatcatcctg

SEQ ID NO: 1637 - RNA, 23 nt, synthetic construct
  misc_feature 1..23: note = Synthetic
  source 1..23: mol_type = other RNA
tttgcaccagttctggatggtca

SEQ ID NO: 1638 - RNA, 23 nt, synthetic construct
  misc_feature 1..23: note = Synthetic
  source 1..23: mol_type = other RNA
tggacgtacttcttcagcatatt

SEQ ID NO: 1639 - RNA, 23 nt, synthetic construct
  misc_feature 1..23: note = Synthetic
  source 1..23: mol_type = other RNA
tcggacgtacttcttcagcatat

SEQ ID NO: 1640 - RNA, 23 nt, synthetic construct
  misc_feature 1..23: note = Synthetic
  source 1..23: mol_type = other RNA
tgggtagtgaagcaatggttttg

SEQ ID NO: 1641 - RNA, 23 nt, synthetic construct
  misc_feature 1..23: note = Synthetic
  source 1..23: mol_type = other RNA
ttgggtagtgaagcaatggtttt

SEQ ID NO: 1642 - RNA, 23 nt, synthetic construct
  misc_feature 1..23: note = Synthetic
  source 1..23: mol_type = other RNA
ttgggacattctctctcggtgct

SEQ ID NO: 1643 - RNA, 23 nt, synthetic construct
  misc_feature 1..23: note = Synthetic
  source 1..23: mol_type = other RNA
tccacaagaataatatacaactg

SEQ ID NO: 1644 - RNA, 23 nt, synthetic construct
  misc_feature 1..23: note = Synthetic
  source 1..23: mol_type = other RNA
ttgcctaatgtgtgcacataaaa

SEQ ID NO: 1645 - RNA, 23 nt, synthetic construct
  misc_feature 1..23: note = Synthetic
  source 1..23: mol_type = other RNA
taatgcctaatgtgtgcacataa

SEQ ID NO: 1646 - RNA, 23 nt, synthetic construct
  misc_feature 1..23: note = Synthetic
  source 1..23: mol_type = other RNA
ttcaatgcctaatgtgtgcacat

SEQ ID NO: 1647 - RNA, 23 nt, synthetic construct
  misc_feature 1..23: note = Synthetic
  source 1..23: mol_type = other RNA
tgcaatgattctgtacaatcatc

SEQ ID NO: 1648 - RNA, 23 nt, synthetic construct
  misc_feature 1..23: note = Synthetic
  source 1..23: mol_type = other RNA
tacaccgatgggtagtgaagcaa

SEQ ID NO: 1649 - RNA, 23 nt, synthetic construct
  misc_feature 1..23: note = Synthetic
  source 1..23: mol_type = other RNA
tcctaatgtgtgcacataaaaca

SEQ ID NO: 1650 - RNA, 23 nt, synthetic construct
  misc_feature 1..23: note = Synthetic
  source 1..23: mol_type = other RNA
tgtaatacagtgtagaaagcgat

SEQ ID NO: 1651 - DNA, 23 bp, synthetic construct
  misc_feature 1..23: note = Synthetic
  source 1..23: mol_type = other DNA
ttgtaatacagtgtagaaagcga

SEQ ID NO: 1652 - DNA, 23 bp, synthetic construct
  misc_feature 1..23: note = Synthetic
  source 1..23: mol_type = other DNA
tttatgtaatacagtgtagaaag

SEQ ID NO: 1653 - RNA, 23 nt, synthetic construct
  misc_feature 1..23: note = Synthetic
  source 1..23: mol_type = other RNA
ttatgtaatacagtgtagaaagc

SEQ ID NO: 1654 - DNA, 23 bp, synthetic construct
  misc_feature 1..23: note = Synthetic
  source 1..23: mol_type = other DNA
tctagtttgatacagctaaattc

SEQ ID NO: 1655 - RNA, 23 nt, synthetic construct
  misc_feature 1..23: note = Synthetic
  source 1..23: mol_type = other RNA
taaatgcatagtgatcaggaaag

SEQ ID NO: 1656 - RNA, 23 nt, synthetic construct
  misc_feature 1..23: note = Synthetic
  source 1..23: mol_type = other RNA
tatctacttgtgttacagcacag

SEQ ID NO: 1657 - DNA, 23 bp, synthetic construct
  misc_feature 1..23: note = Synthetic
  source 1..23: mol_type = other DNA
tactagtttgatacagctaaatt

SEQ ID NO: 1658 - RNA, 23 nt, synthetic construct
  misc_feature 1..23: note = Synthetic
  source 1..23: mol_type = other RNA
taatgcatagtgatcaggaaagg

SEQ ID NO: 1659 - DNA, 23 bp, synthetic construct
  misc_feature 1..23: note = Synthetic
  source 1..23: mol_type = other DNA
ttacagtacacaaaacccattaa

SEQ ID NO: 1660 - RNA, 23 nt, synthetic construct
  misc_feature 1..23: note = Synthetic
  source 1..23: mol_type = other RNA
tagcagcaatctgtacagtaaaa

SEQ ID NO: 1661 - RNA, 23 nt, synthetic construct
  misc_feature 1..23: note = Synthetic
  source 1..23: mol_type = other RNA
taagcaatgattctgtacaatca

SEQ ID NO: 1662 - RNA, 23 nt, synthetic construct
  misc_feature 1..23: note = Synthetic
  source 1..23: mol_type = other RNA
ttaagcaatgattctgtacaatc

SEQ ID NO: 1663 - RNA, 23 nt, synthetic construct
  misc_feature 1..23: note = Synthetic
  source 1..23: mol_type = other RNA
tgacgtacttcttcagcatattg

SEQ ID NO: 1664 - DNA, 23 bp, synthetic construct
  misc_feature 1..23: note = Synthetic
  source 1..23: mol_type = other DNA
tatgggtagtgaagcaatggttt

SEQ ID NO: 1665 - DNA, 23 bp, synthetic construct
  misc_feature 1..23: note = Synthetic
  source 1..23: mol_type = other DNA
tctacttgtgttacagcacagct

SEQ ID NO: 1666 - RNA, 23 nt, synthetic construct
  misc_feature 1..23: note = Synthetic
  source 1..23: mol_type = other RNA
tcatctacttgtgttacagcaca

SEQ ID NO: 1667 - DNA, 23 bp, synthetic construct
  misc_feature 1..23: note = Synthetic
  source 1..23: mol_type = other DNA
tttgtgttacagcacagctgtca

SEQ ID NO: 1668 - DNA, 23 bp, synthetic construct
  misc_feature 1..23: note = Synthetic
  source 1..23: mol_type = other DNA
tgcatctacttgtgttacagcac

SEQ ID NO: 1669 - RNA, 23 nt, synthetic construct
  misc_feature 1..23: note = Synthetic
  source 1..23: mol_type = other RNA
tctattcatgcactagtttgata

SEQ ID NO: 1670 - DNA, 23 bp, synthetic construct
  misc_feature 1..23: note = Synthetic
  source 1..23: mol_type = other DNA
ttctattcatgcactagtttgat

SEQ ID NO: 1671 - DNA, 23 bp, synthetic construct
  misc_feature 1..23: note = Synthetic
  source 1..23: mol_type = other DNA
tttctgtacaatcatcctgcaga

SEQ ID NO: 1672 - RNA, 23 nt, synthetic construct
  misc_feature 1..23: note = Synthetic
  source 1..23: mol_type = other RNA
tattctgtacaatcatcctgcag

SEQ ID NO: 1673 - DNA, 23 bp, synthetic construct
  misc_feature 1..23: note = Synthetic
  source 1..23: mol_type = other DNA
tgattctgtacaatcatcctgca

SEQ ID NO: 1674 - DNA, 23 bp, synthetic construct
  misc_feature 1..23: note = Synthetic
  source 1..23: mol_type = other DNA
tattcatgcactagtttgataca

SEQ ID NO: 1675 - DNA, 23 bp, synthetic construct
  misc_feature 1..23: note = Synthetic
  source 1..23: mol_type = other DNA
tgcacataaaacaggcacaaaga

SEQ ID NO: 1676 - RNA, 23 nt, synthetic construct
  misc_feature 1..23: note = Synthetic
  source 1..23: mol_type = other RNA
ttgcacataaaacaggcacaaag

SEQ ID NO: 1677 - RNA, 23 nt, synthetic construct
  misc_feature 1..23: note = Synthetic
  source 1..23: mol_type = other RNA
ttctgtacaatcatcctgcagaa

SEQ ID NO: 1678 - DNA, 23 bp, synthetic construct
  misc_feature 1..23: note = Synthetic
  source 1..23: mol_type = other DNA
ttcccattctctcatgacctggg

SEQ ID NO: 1679 - DNA, 23 bp, synthetic construct
  misc_feature 1..23: note = Synthetic
  source 1..23: mol_type = other DNA
tggacgtacttcttcagcatatt

SEQ ID NO: 1680 - RNA, 23 nt, synthetic construct
  misc_feature 1..23: note = Synthetic
  source 1..23: mol_type = other RNA
tcggacgtacttcttcagcatat

SEQ ID NO: 1681 - RNA, 23 nt, synthetic construct
  misc_feature 1..23: note = Synthetic
  source 1..23: mol_type = other RNA
tgggtagtgaagcaatggttttg

SEQ ID NO: 1682 - RNA, 23 nt, synthetic construct
  misc_feature 1..23: note = Synthetic
  source 1..23: mol_type = other RNA
ttgggtagtgaagcaatggtttt

SEQ ID NO: 1683 - DNA, 23 bp, synthetic construct
  misc_feature 1..23: note = Synthetic
  source 1..23: mol_type = other DNA
tatgcctaatgtgtgcacataaa

SEQ ID NO: 1684 - RNA, 23 nt, synthetic construct
  misc_feature 1..23: note = Synthetic
  source 1..23: mol_type = other RNA
tcaatgcctaatgtgtgcacata

SEQ ID NO: 1685 - DNA, 23 bp, synthetic construct
  misc_feature 1..23: note = Synthetic
  source 1..23: mol_type = other DNA
tatgattctgtacaatcatcctg

SEQ ID NO: 1686 - RNA, 23 nt, synthetic construct
  misc_feature 1..23: note = Synthetic
  source 1..23: mol_type = other RNA
tttgcaccagttctggatggtca

SEQ ID NO: 1687 - RNA, 23 nt, synthetic construct
  misc_feature 1..23: note = Synthetic
  source 1..23: mol_type = other RNA
ttgggacattctctctcggtgct

SEQ ID NO: 1688 - RNA, 23 nt, synthetic construct
  misc_feature 1..23: note = Synthetic
  source 1..23: mol_type = other RNA
tccacaagaataatatacaactg

SEQ ID NO: 1689 - RNA, 23 nt, synthetic construct
  misc_feature 1..23: note = Synthetic
  source 1..23: mol_type = other RNA
ttgcctaatgtgtgcacataaaa

SEQ ID NO: 1690 - RNA, 23 nt, synthetic construct
  misc_feature 1..23: note = Synthetic
  source 1..23: mol_type = other RNA
taatgcctaatgtgtgcacataa

SEQ ID NO: 1691 - RNA, 23 nt, synthetic construct
  misc_feature 1..23: note = Synthetic
  source 1..23: mol_type = other RNA
ttcaatgcctaatgtgtgcacat

SEQ ID NO: 1692 - RNA, 23 nt, synthetic construct
  misc_feature 1..23: note = Synthetic
  source 1..23: mol_type = other RNA
tgcaatgattctgtacaatcatc

SEQ ID NO: 1693 - RNA, 23 nt, synthetic construct
  misc_feature 1..23: note = Synthetic
  source 1..23: mol_type = other RNA
tacaccgatgggtagtgaagcaa

SEQ ID NO: 1694 - DNA, 23 bp, synthetic construct
  misc_feature 1..23: note = Synthetic
  source 1..23: mol_type = other DNA
tcctaatgtgtgcacataaaaca

SEQ ID NO: 1695 - RNA, 21 nt, synthetic construct
  misc_feature 1..21: note = Synthetic
  source 1..21: mol_type = other RNA
cgctttctacactgtattaca

SEQ ID NO: 1696 - RNA, 21 nt, synthetic construct
  misc_feature 1..21: note = Synthetic
  source 1..21: mol_type = other RNA
gctttctacactgtattacaa

SEQ ID NO: 1697 - RNA, 21 nt, synthetic construct
  misc_feature 1..21: note = Synthetic
  source 1..21: mol_type = other RNA
ttctacactgtattacataaa

SEQ ID NO: 1698 - RNA, 21 nt, synthetic construct
  misc_feature 1..21: note = Synthetic
  source 1..21: mol_type = other RNA
tttctacactgtattacataa

SEQ ID NO: 1699 - RNA, 21 nt, synthetic construct
  misc_feature 1..21: note = Synthetic
  source 1..21: mol_type = other RNA
atttagctgtatcaaactaga

SEQ ID NO: 1700 - RNA, 21 nt, synthetic construct
  misc_feature 1..21: note = Synthetic
  source 1..21: mol_type = other RNA
ttcctgatcactatgcattta

SEQ ID NO: 1701 - RNA, 21 nt, synthetic construct
  misc_feature 1..21: note = Synthetic
  source 1..21: mol_type = other RNA
gtgctgtaacacaagtagata

SEQ ID NO: 1702 - RNA, 21 nt, synthetic construct
  misc_feature 1..21: note = Synthetic
  source 1..21: mol_type = other RNA
tttagctgtatcaaactagta

SEQ ID NO: 1703 - RNA, 21 nt, synthetic construct
  misc_feature 1..21: note = Synthetic
  source 1..21: mol_type = other RNA
tttcctgatcactatgcatta

SEQ ID NO: 1704 - RNA, 21 nt, synthetic construct
  misc_feature 1..21: note = Synthetic
  source 1..21: mol_type = other RNA
aatgggttttgtgtactgtaa

SEQ ID NO: 1705 - RNA, 21 nt, synthetic construct
  misc_feature 1..21: note = Synthetic
  source 1..21: mol_type = other RNA
attgtacagaatcattgctta

SEQ ID NO: 1706 - RNA, 21 nt, synthetic construct
  misc_feature 1..21: note = Synthetic
  source 1..21: mol_type = other RNA
ttgtacagaatcattgcttaa

SEQ ID NO: 1707 - RNA, 21 nt, synthetic construct
  misc_feature 1..21: note = Synthetic
  source 1..21: mol_type = other RNA
ttactgtacagattgctgcta

SEQ ID NO: 1708 - RNA, 21 nt, synthetic construct
  misc_feature 1..21: note = Synthetic
  source 1..21: mol_type = other RNA
atatgctgaagaagtacgtca

SEQ ID NO: 1709 - RNA, 21 nt, synthetic construct
  misc_feature 1..21: note = Synthetic
  source 1..21: mol_type = other RNA
accattgcttcactacccata

SEQ ID NO: 1710 - RNA, 21 nt, synthetic construct
  misc_feature 1..21: note = Synthetic
  source 1..21: mol_type = other RNA
ctgtgctgtaacacaagtaga

SEQ ID NO: 1711 - RNA, 21 nt, synthetic construct
  misc_feature 1..21: note = Synthetic
  source 1..21: mol_type = other RNA
tgctgtaacacaagtagatga

SEQ ID NO: 1712 - RNA, 21 nt, synthetic construct
  misc_feature 1..21: note = Synthetic
  source 1..21: mol_type = other RNA
acagctgtgctgtaacacaaa

SEQ ID NO: 1713 - RNA, 21 nt, synthetic construct
  misc_feature 1..21: note = Synthetic
  source 1..21: mol_type = other RNA
gctgtaacacaagtagatgca

SEQ ID NO: 1714 - RNA, 21 nt, synthetic construct
  misc_feature 1..21: note = Synthetic
  source 1..21: mol_type = other RNA
tcaaactagtgcatgaataga

SEQ ID NO: 1715 - RNA, 21 nt, synthetic construct
  misc_feature 1..21: note = Synthetic
  source 1..21: mol_type = other RNA
caaactagtgcatgaatagaa

SEQ ID NO: 1716 - RNA, 21 nt, synthetic construct
  misc_feature 1..21: note = Synthetic
  source 1..21: mol_type = other RNA
tgcaggatgattgtacagaaa

SEQ ID NO: 1717 - RNA, 21 nt, synthetic construct
  misc_feature 1..21: note = Synthetic
  source 1..21: mol_type = other RNA
gcaggatgattgtacagaata

SEQ ID NO: 1718 - RNA, 21 nt, synthetic construct
  misc_feature 1..21: note = Synthetic
  source 1..21: mol_type = other RNA
caggatgattgtacagaatca

SEQ ID NO: 1719 - RNA, 21 nt, synthetic construct
  misc_feature 1..21: note = Synthetic
  source 1..21: mol_type = other RNA
tatcaaactagtgcatgaata

SEQ ID NO: 1720 - RNA, 21 nt, synthetic construct
  misc_feature 1..21: note = Synthetic
  source 1..21: mol_type = other RNA
tttgtgcctgttttatgtgca

SEQ ID NO: 1721 - RNA, 21 nt, synthetic construct
  misc_feature 1..21: note = Synthetic
  source 1..21: mol_type = other RNA
ttgtgcctgttttatgtgcaa

SEQ ID NO: 1722 - RNA, 21 nt, synthetic construct
  misc_feature 1..21: note = Synthetic
  source 1..21: mol_type = other RNA
ctgcaggatgattgtacagaa

SEQ ID NO: 1723 - RNA, 21 nt, synthetic construct
  misc_feature 1..21: note = Synthetic
  source 1..21: mol_type = other RNA
caggtcatgagagaatgggaa

SEQ ID NO: 1724 - RNA, 21 nt, synthetic construct
  misc_feature 1..21: note = Synthetic
  source 1..21: mol_type = other RNA
tatgtgcacacattaggcata

SEQ ID NO: 1725 - RNA, 21 nt, synthetic construct
  misc_feature 1..21: note = Synthetic
  source 1..21: mol_type = other RNA
tgtgcacacattaggcattga

SEQ ID NO: 1726 - RNA, 21 nt, synthetic construct
  misc_feature 1..21: note = Synthetic
  source 1..21: mol_type = other RNA
ggatgattgtacagaatcata

SEQ ID NO: 1727 - RNA, 21 nt, synthetic construct
  misc_feature 1..21: note = Synthetic
  source 1..21: mol_type = other RNA
accatccagaactggtgcaaa

SEQ ID NO: 1728 - RNA, 21 nt, synthetic construct
  misc_feature 1..21: note = Synthetic
  source 1..21: mol_type = other RNA
tatgctgaagaagtacgtcca

SEQ ID NO: 1729 - RNA, 21 nt, synthetic construct
  misc_feature 1..21: note = Synthetic
  source 1..21: mol_type = other RNA
atgctgaagaagtacgtccga

SEQ ID NO: 1730 - RNA, 21 nt, synthetic construct
  misc_feature 1..21: note = Synthetic
  source 1..21: mol_type = other RNA
aaaccattgcttcactaccca

SEQ ID NO: 1731 - RNA, 21 nt, synthetic construct
  misc_feature 1..21: note = Synthetic
  source 1..21: mol_type = other RNA
aaccattgcttcactacccaa

SEQ ID NO: 1732 - RNA, 21 nt, synthetic construct
  misc_feature 1..21: note = Synthetic
  source 1..21: mol_type = other RNA
caccgagagagaatgtcccaa

SEQ ID NO: 1733 - RNA, 21 nt, synthetic construct
  misc_feature 1..21: note = Synthetic
  source 1..21: mol_type = other RNA
gttgtatattattcttgtgga

SEQ ID NO: 1734 - RNA, 21 nt, synthetic construct
  misc_feature 1..21: note = Synthetic
  source 1..21: mol_type = other RNA
ttatgtgcacacattaggcaa

SEQ ID NO: 1735 - RNA, 21 nt, synthetic construct
  misc_feature 1..21: note = Synthetic
  source 1..21: mol_type = other RNA
atgtgcacacattaggcatta

SEQ ID NO: 1736 - RNA, 21 nt, synthetic construct
  misc_feature 1..21: note = Synthetic
  source 1..21: mol_type = other RNA
gtgcacacattaggcattgaa

SEQ ID NO: 1737 - RNA, 21 nt, synthetic construct
  misc_feature 1..21: note = Synthetic
  source 1..21: mol_type = other RNA
tgattgtacagaatcattgca

SEQ ID NO: 1738 - RNA, 21 nt, synthetic construct
  misc_feature 1..21: note = Synthetic
  source 1..21: mol_type = other RNA
gcttcactacccatcggtgta

SEQ ID NO: 1739 - RNA, 21 nt, synthetic construct
  misc_feature 1..21: note = Synthetic
  source 1..21: mol_type = other RNA
ttttatgtgcacacattagga

SEQ ID NO: 1740 - RNA, 21 nt, synthetic construct
  misc_feature 1..21: note = Synthetic
  source 1..21: mol_type = other RNA
cgctttctacactgtattaca

SEQ ID NO: 1741 - RNA, 21 nt, synthetic construct
  misc_feature 1..21: note = Synthetic
  source 1..21: mol_type = other RNA
gctttctacactgtattacaa

SEQ ID NO: 1742 - RNA, 21 nt, synthetic construct
  misc_feature 1..21: note = Synthetic
  source 1..21: mol_type = other RNA
ttctacactgtattacataaa

SEQ ID NO: 1743 - RNA, 21 nt, synthetic construct
  misc_feature 1..21: note = Synthetic
  source 1..21: mol_type = other RNA
tttctacactgtattacataa

SEQ ID NO: 1744 - RNA, 21 nt, synthetic construct
  misc_feature 1..21: note = Synthetic
  source 1..21: mol_type = other RNA
atttagctgtatcaaactaga

SEQ ID NO: 1745 - RNA, 21 nt, synthetic construct
  misc_feature 1..21: note = Synthetic
  source 1..21: mol_type = other RNA
ttcctgatcactatgcattta

SEQ ID NO: 1746 - RNA, 21 nt, synthetic construct
  misc_feature 1..21: note = Synthetic
  source 1..21: mol_type = other RNA
gtgctgtaacacaagtagata

SEQ ID NO: 1747 - RNA, 21 nt, synthetic construct
  misc_feature 1..21: note = Synthetic
  source 1..21: mol_type = other RNA
tttagctgtatcaaactagta

SEQ ID NO: 1748 - RNA, 21 nt, synthetic construct
  misc_feature 1..21: note = Synthetic
  source 1..21: mol_type = other RNA
tttcctgatcactatgcatta

SEQ ID NO: 1749 - RNA, 21 nt, synthetic construct
  misc_feature 1..21: note = Synthetic
  source 1..21: mol_type = other RNA
aatgggttttgtgtactgtaa

SEQ ID NO: 1750 - RNA, 21 nt, synthetic construct
  misc_feature 1..21: note = Synthetic
  source 1..21: mol_type = other RNA
ttactgtacagattgctgcta

SEQ ID NO: 1751 - RNA, 21 nt, synthetic construct
  misc_feature 1..21: note = Synthetic
  source 1..21: mol_type = other RNA
attgtacagaatcattgctta

SEQ ID NO: 1752 - RNA, 21 nt, synthetic construct
  misc_feature 1..21: note = Synthetic
  source 1..21: mol_type = other RNA
ttgtacagaatcattgcttaa

SEQ ID NO: 1753 - RNA, 21 nt, synthetic construct
  misc_feature 1..21: note = Synthetic
  source 1..21: mol_type = other RNA
atatgctgaagaagtacgtca

SEQ ID NO: 1754 - RNA, 21 nt, synthetic construct
  misc_feature 1..21: note = Synthetic
  source 1..21: mol_type = other RNA
accattgcttcactacccata

SEQ ID NO: 1755 - RNA, 21 nt, synthetic construct
  misc_feature 1..21: note = Synthetic
  source 1..21: mol_type = other RNA
ctgtgctgtaacacaagtaga

SEQ ID NO: 1756 - RNA, 21 nt, synthetic construct
  misc_feature 1..21: note = Synthetic
  source 1..21: mol_type = other RNA
tgctgtaacacaagtagatga

SEQ ID NO: 1757 - RNA, 21 nt, synthetic construct
  misc_feature 1..21: note = Synthetic
  source 1..21: mol_type = other RNA
acagctgtgctgtaacacaaa

SEQ ID NO: 1758 - RNA, 21 nt, synthetic construct
  misc_feature 1..21: note = Synthetic
  source 1..21: mol_type = other RNA
gctgtaacacaagtagatgca

SEQ ID NO: 1759 - RNA, 21 nt, synthetic construct
  misc_feature 1..21: note = Synthetic
  source 1..21: mol_type = other RNA
tcaaactagtgcatgaataga

SEQ ID NO: 1760 - RNA, 21 nt, synthetic construct
  misc_feature 1..21: note = Synthetic
  source 1..21: mol_type = other RNA
caaactagtgcatgaatagaa

SEQ ID NO: 1761 - RNA, 21 nt, synthetic construct
  misc_feature 1..21: note = Synthetic
  source 1..21: mol_type = other RNA
tgcaggatgattgtacagaaa

SEQ ID NO: 1762 - RNA, 21 nt, synthetic construct
  misc_feature 1..21: note = Synthetic
  source 1..21: mol_type = other RNA
gcaggatgattgtacagaata

SEQ ID NO: 1763 - RNA, 21 nt, synthetic construct
  misc_feature 1..21: note = Synthetic
  source 1..21: mol_type = other RNA
caggatgattgtacagaatca

SEQ ID NO: 1764 - RNA, 21 nt, synthetic construct
  misc_feature 1..21: note = Synthetic
  source 1..21: mol_type = other RNA
tatcaaactagtgcatgaata

SEQ ID NO: 1765 - RNA, 21 nt, synthetic construct
  misc_feature 1..21: note = Synthetic
  source 1..21: mol_type = other RNA
tttgtgcctgttttatgtgca

SEQ ID NO: 1766 - RNA, 21 nt, synthetic construct
  misc_feature 1..21: note = Synthetic
  source 1..21: mol_type = other RNA
ttgtgcctgttttatgtgcaa

SEQ ID NO: 1767 - RNA, 21 nt, synthetic construct
  misc_feature 1..21: note = Synthetic
  source 1..21: mol_type = other RNA
ctgcaggatgattgtacagaa

SEQ ID NO: 1768 - RNA, 21 nt, synthetic construct
  misc_feature 1..21: note = Synthetic
  source 1..21: mol_type = other RNA
caggtcatgagagaatgggaa

SEQ ID NO: 1769 - RNA, 21 nt, synthetic construct
  misc_feature 1..21: note = Synthetic
  source 1..21: mol_type = other RNA
tatgctgaagaagtacgtcca

SEQ ID NO: 1770 - RNA, 21 nt, synthetic construct
  misc_feature 1..21: note = Synthetic
  source 1..21: mol_type = other RNA
atgctgaagaagtacgtccga

SEQ ID NO: 1771 - RNA, 21 nt, synthetic construct
  misc_feature 1..21: note = Synthetic
  source 1..21: mol_type = other RNA
aaaccattgcttcactaccca

SEQ ID NO: 1772 - RNA, 21 nt, synthetic construct
  misc_feature 1..21: note = Synthetic
  source 1..21: mol_type = other RNA
aaccattgcttcactacccaa

SEQ ID NO: 1773 - RNA, 21 nt, synthetic construct
  misc_feature 1..21: note = Synthetic
  source 1..21: mol_type = other RNA
tatgtgcacacattaggcata

SEQ ID NO: 1774 - RNA, 21 nt, synthetic construct
  misc_feature 1..21: note = Synthetic
  source 1..21: mol_type = other RNA
tgtgcacacattaggcattga

SEQ ID NO: 1775 - RNA, 21 nt, synthetic construct
  misc_feature 1..21: note = Synthetic
  source 1..21: mol_type = other RNA
ggatgattgtacagaatcata

SEQ ID NO: 1776 - RNA, 21 nt, synthetic construct
  misc_feature 1..21: note = Synthetic
  source 1..21: mol_type = other RNA
accatccagaactggtgcaaa

SEQ ID NO: 1777 - RNA, 21 nt, synthetic construct
  misc_feature 1..21: note = Synthetic
  source 1..21: mol_type = other RNA
caccgagagagaatgtcccaa

SEQ ID NO: 1778 - RNA, 21 nt, synthetic construct
  misc_feature 1..21: note = Synthetic
  source 1..21: mol_type = other RNA
gttgtatattattcttgtgga

SEQ ID NO: 1779 - RNA, 21 nt, synthetic construct
  misc_feature 1..21: note = Synthetic
  source 1..21: mol_type = other RNA
ttatgtgcacacattaggcaa

SEQ ID NO: 1780 - RNA, 21 nt, synthetic construct
  misc_feature 1..21: note = Synthetic
  source 1..21: mol_type = other RNA
atgtgcacacattaggcatta

SEQ ID NO: 1781 - RNA, 21 nt, synthetic construct
  misc_feature 1..21: note = Synthetic
  source 1..21: mol_type = other RNA
gtgcacacattaggcattgaa

SEQ ID NO: 1782 - RNA, 21 nt, synthetic construct
  misc_feature 1..21: note = Synthetic
  source 1..21: mol_type = other RNA
tgattgtacagaatcattgca

SEQ ID NO: 1783 - RNA, 21 nt, synthetic construct
  misc_feature 1..21: note = Synthetic
  source 1..21: mol_type = other RNA
gcttcactacccatcggtgta

SEQ ID NO: 1784 - RNA, 21 nt, synthetic construct
  misc_feature 1..21: note = Synthetic
  source 1..21: mol_type = other RNA
ttttatgtgcacacattagga

SEQ ID NO: 1785 - RNA, 23 nt, synthetic construct
  misc_feature 1..23: note = Synthetic
  source 1..23: mol_type = other RNA
tgtaatacagtgtagaaagcgat

SEQ ID NO: 1786 - RNA, 23 nt, synthetic construct
  misc_feature 1..23: note = Synthetic
  source 1..23: mol_type = other RNA
ttgtaatacagtgtagaaagcga

SEQ ID NO: 1787 - RNA, 23 nt, synthetic construct
  misc_feature 1..23: note = Synthetic
  source 1..23: mol_type = other RNA
tttatgtaatacagtgtagaaag

SEQ ID NO: 1788 - RNA, 23 nt, synthetic construct
  misc_feature 1..23: note = Synthetic
  source 1..23: mol_type = other RNA
ttatgtaatacagtgtagaaagc

SEQ ID NO: 1789 - RNA, 23 nt, synthetic construct
  misc_feature 1..23: note = Synthetic
  source 1..23: mol_type = other RNA
tctagtttgatacagctaaattc

SEQ ID NO: 1790 - RNA, 23 nt, synthetic construct
  misc_feature 1..23: note = Synthetic
  source 1..23: mol_type = other RNA
taaatgcatagtgatcaggaaag

SEQ ID NO: 1791 - RNA, 23 nt, synthetic construct
  misc_feature 1..23: note = Synthetic
  source 1..23: mol_type = other RNA
tatctacttgtgttacagcacag

SEQ ID NO: 1792 - RNA, 23 nt, synthetic construct
  misc_feature 1..23: note = Synthetic
  source 1..23: mol_type = other RNA
tactagtttgatacagctaaatt

SEQ ID NO: 1793 - RNA, 23 nt, synthetic construct
  misc_feature 1..23: note = Synthetic
  source 1..23: mol_type = other RNA
taatgcatagtgatcaggaaagg

SEQ ID NO: 1794 - RNA, 23 nt, synthetic construct
  misc_feature 1..23: note = Synthetic
  source 1..23: mol_type = other RNA
ttacagtacacaaaacccattaa

SEQ ID NO: 1795 - RNA, 23 nt, synthetic construct
  misc_feature 1..23: note = Synthetic
  source 1..23: mol_type = other RNA
taagcaatgattctgtacaatca

SEQ ID NO: 1796 - RNA, 23 nt, synthetic construct
  misc_feature 1..23: note = Synthetic
  source 1..23: mol_type = other RNA
ttaagcaatgattctgtacaatc

SEQ ID NO: 1797 - RNA, 23 nt, synthetic construct
  misc_feature 1..23: note = Synthetic
  source 1..23: mol_type = other RNA
tagcagcaatctgtacagtaaaa

SEQ ID NO: 1798 - RNA, 23 nt, synthetic construct
  misc_feature 1..23: note = Synthetic
  source 1..23: mol_type = other RNA
tgacgtacttcttcagcatattg

SEQ ID NO: 1799 - RNA, 23 nt, synthetic construct
  misc_feature 1..23: note = Synthetic
  source 1..23: mol_type = other RNA
tatgggtagtgaagcaatggttt

SEQ ID NO: 1800 - RNA, 23 nt, synthetic construct
  misc_feature 1..23: note = Synthetic
  source 1..23: mol_type = other RNA
tctacttgtgttacagcacagct

SEQ ID NO: 1801 - RNA, 23 nt, synthetic construct
  misc_feature 1..23: note = Synthetic
  source 1..23: mol_type = other RNA
tcatctacttgtgttacagcaca

SEQ ID NO: 1802 - RNA, 23 nt, synthetic construct
  misc_feature 1..23: note = Synthetic
  source 1..23: mol_type = other RNA
tttgtgttacagcacagctgtca

SEQ ID NO: 1803 - RNA, 23 nt, synthetic construct
  misc_feature 1..23: note = Synthetic
  source 1..23: mol_type = other RNA
tgcatctacttgtgttacagcac

SEQ ID NO: 1804 - RNA, 23 nt, synthetic construct
  misc_feature 1..23: note = Synthetic
  source 1..23: mol_type = other RNA
tctattcatgcactagtttgata

SEQ ID NO: 1805 - RNA, 23 nt, synthetic construct
  misc_feature 1..23: note = Synthetic
  source 1..23: mol_type = other RNA
ttctattcatgcactagtttgat

SEQ ID NO: 1806 - RNA, 23 nt, synthetic construct
  misc_feature 1..23: note = Synthetic
  source 1..23: mol_type = other RNA
tttctgtacaatcatcctgcaga

SEQ ID NO: 1807 - RNA, 23 nt, synthetic construct
  misc_feature 1..23: note = Synthetic
  source 1..23: mol_type = other RNA
tattctgtacaatcatcctgcag

SEQ ID NO: 1808 - RNA, 23 nt, synthetic construct
  misc_feature 1..23: note = Synthetic
  source 1..23: mol_type = other RNA
tgattctgtacaatcatcctgca

SEQ ID NO: 1809 - RNA, 23 nt, synthetic construct
  misc_feature 1..23: note = Synthetic
  source 1..23: mol_type = other RNA
tattcatgcactagtttgataca

SEQ ID NO: 1810 - RNA, 23 nt, synthetic construct
  misc_feature 1..23: note = Synthetic
  source 1..23: mol_type = other RNA
tgcacataaaacaggcacaaaga

SEQ ID NO: 1811 - RNA, 23 nt, synthetic construct
  misc_feature 1..23: note = Synthetic
  source 1..23: mol_type = other RNA
ttgcacataaaacaggcacaaag

SEQ ID NO: 1812 - RNA, 23 nt, synthetic construct
  misc_feature 1..23: note = Synthetic
  source 1..23: mol_type = other RNA
ttctgtacaatcatcctgcagaa

SEQ ID NO: 1813 - RNA, 23 nt, synthetic construct
  misc_feature 1..23: note = Synthetic
  source 1..23: mol_type = other RNA
ttcccattctctcatgacctggg

SEQ ID NO: 1814 - RNA, 23 nt, synthetic construct
  misc_feature 1..23: note = Synthetic
  source 1..23: mol_type = other RNA
tatgcctaatgtgtgcacataaa

SEQ ID NO: 1815 - RNA, 23 nt, synthetic construct
  misc_feature 1..23: note = Synthetic
  source 1..23: mol_type = other RNA
tcaatgcctaatgtgtgcacata

SEQ ID NO: 1816 - RNA, 23 nt, synthetic construct
  misc_feature 1..23: note = Synthetic
  source 1..23: mol_type = other RNA
tatgattctgtacaatcatcctg

SEQ ID NO: 1817 - RNA, 23 nt, synthetic construct
  misc_feature 1..23: note = Synthetic
  source 1..23: mol_type = other RNA
tttgcaccagttctggatggtca

SEQ ID NO: 1818 - RNA, 23 nt, synthetic construct
  misc_feature 1..23: note = Synthetic
  source 1..23: mol_type = other RNA
tggacgtacttcttcagcatatt

SEQ ID NO: 1819 - RNA, 23 nt, synthetic construct
  misc_feature 1..23: note = Synthetic
  source 1..23: mol_type = other RNA
tcggacgtacttcttcagcatat

SEQ ID NO: 1820 - RNA, 23 nt, synthetic construct
  misc_feature 1..23: note = Synthetic
  source 1..23: mol_type = other RNA
tgggtagtgaagcaatggttttg

SEQ ID NO: 1821 - RNA, 23 nt, synthetic construct
  misc_feature 1..23: note = Synthetic
  source 1..23: mol_type = other RNA
ttgggtagtgaagcaatggtttt

SEQ ID NO: 1822 - RNA, 23 nt, synthetic construct
  misc_feature 1..23: note = Synthetic
  source 1..23: mol_type = other RNA
ttgggacattctctctcggtgct

SEQ ID NO: 1823 - RNA, 23 nt, synthetic construct
  misc_feature 1..23: note = Synthetic
  source 1..23: mol_type = other RNA
tccacaagaataatatacaactg

SEQ ID NO: 1824 - RNA, 23 nt, synthetic construct
  misc_feature 1..23: note = Synthetic
  source 1..23: mol_type = other RNA
ttgcctaatgtgtgcacataaaa

SEQ ID NO: 1825 - RNA, 23 nt, synthetic construct
  misc_feature 1..23: note = Synthetic
  source 1..23: mol_type = other RNA
taatgcctaatgtgtgcacataa

SEQ ID NO: 1826 - RNA, 23 nt, synthetic construct
  misc_feature 1..23: note = Synthetic
  source 1..23: mol_type = other RNA
ttcaatgcctaatgtgtgcacat

SEQ ID NO: 1827 - RNA, 23 nt, synthetic construct
  misc_feature 1..23: note = Synthetic
  source 1..23: mol_type = other RNA
tgcaatgattctgtacaatcatc

SEQ ID NO: 1828 - RNA, 23 nt, synthetic construct
  misc_feature 1..23: note = Synthetic
  source 1..23: mol_type = other RNA
tacaccgatgggtagtgaagcaa

SEQ ID NO: 1829 - RNA, 23 nt, synthetic construct
  misc_feature 1..23: note = Synthetic
  source 1..23: mol_type = other RNA
tcctaatgtgtgcacataaaaca

SEQ ID NO: 1830 - RNA, 23 nt, synthetic construct
  misc_feature 1..23: note = Synthetic
  source 1..23: mol_type = other RNA
tgtaatacagtgtagaaagcgat

SEQ ID NO: 1831 - DNA, 23 bp, synthetic construct
  misc_feature 1..23: note = Synthetic
  source 1..23: mol_type = other DNA
ttgtaatacagtgtagaaagcga

SEQ ID NO: 1832 - DNA, 23 bp, synthetic construct
  misc_feature 1..23: note = Synthetic
  source 1..23: mol_type = other DNA
tttatgtaatacagtgtagaaag

SEQ ID NO: 1833 - RNA, 23 nt, synthetic construct
  misc_feature 1..23: note = Synthetic
  source 1..23: mol_type = other RNA
ttatgtaatacagtgtagaaagc

SEQ ID NO: 1834 - DNA, 23 bp, synthetic construct
  misc_feature 1..23: note = Synthetic
  source 1..23: mol_type = other DNA
tctagtttgatacagctaaattc

SEQ ID NO: 1835 - RNA, 23 nt, synthetic construct
  misc_feature 1..23: note = Synthetic
  source 1..23: mol_type = other RNA
taaatgcatagtgatcaggaaag

SEQ ID NO: 1836 - RNA, 23 nt, synthetic construct
  misc_feature 1..23: note = Synthetic
  source 1..23: mol_type = other RNA
tatctacttgtgttacagcacag

SEQ ID NO: 1837 - DNA, 23 bp, synthetic construct
  misc_feature 1..23: note = Synthetic
  source 1..23: mol_type = other DNA
tactagtttgatacagctaaatt

SEQ ID NO: 1838 - RNA, 23 nt, synthetic construct
  misc_feature 1..23: note = Synthetic
  source 1..23: mol_type = other RNA
taatgcatagtgatcaggaaagg

SEQ ID NO: 1839 - DNA, 23 bp, synthetic construct
  misc_feature 1..23: note = Synthetic
  source 1..23: mol_type = other DNA
ttacagtacacaaaacccattaa

SEQ ID NO: 1840 - RNA, 23 nt, synthetic construct
  misc_feature 1..23: note = Synthetic
  source 1..23: mol_type = other RNA
tagcagcaatctgtacagtaaaa

SEQ ID NO: 1841 - RNA, 23 nt, synthetic construct
  misc_feature 1..23: note = Synthetic
  source 1..23: mol_type = other RNA
taagcaatgattctgtacaatca

SEQ ID NO: 1842 - RNA, 23 nt, synthetic construct
  misc_feature 1..23: note = Synthetic
  source 1..23: mol_type = other RNA
ttaagcaatgattctgtacaatc

SEQ ID NO: 1843 - RNA, 23 nt, synthetic construct
  misc_feature 1..23: note = Synthetic
  source 1..23: mol_type = other RNA
tgacgtacttcttcagcatattg

SEQ ID NO: 1844 - DNA, 23 bp, synthetic construct
  misc_feature 1..23: note = Synthetic
  source 1..23: mol_type = other DNA
tatgggtagtgaagcaatggttt

SEQ ID NO: 1845 - DNA, 23 bp, synthetic construct
  misc_feature 1..23: note = Synthetic
  source 1..23: mol_type = other DNA
tctacttgtgttacagcacagct

SEQ ID NO: 1846 - RNA, 23 nt, synthetic construct
  misc_feature 1..23: note = Synthetic
  source 1..23: mol_type = other RNA
tcatctacttgtgttacagcaca

SEQ ID NO: 1847 - DNA, 23 bp, synthetic construct
  misc_feature 1..23: note = Synthetic
  source 1..23: mol_type = other DNA
tttgtgttacagcacagctgtca

SEQ ID NO: 1848 - DNA, 23 bp, synthetic construct
  misc_feature 1..23: note = Synthetic
  source 1..23: mol_type = other DNA
tgcatctacttgtgttacagcac

SEQ ID NO: 1849 - RNA, 23 nt, synthetic construct
  misc_feature 1..23: note = Synthetic
  source 1..23: mol_type = other RNA
tctattcatgcactagtttgata

SEQ ID NO: 1850 - DNA, 23 bp, synthetic construct
  misc_feature 1..23: note = Synthetic
  source 1..23: mol_type = other DNA
ttctattcatgcactagtttgat

SEQ ID NO: 1851 - DNA, 23 bp, synthetic construct
  misc_feature 1..23: note = Synthetic
  source 1..23: mol_type = other DNA
tttctgtacaatcatcctgcaga

SEQ ID NO: 1852 - RNA, 23 nt, synthetic construct
  misc_feature 1..23: note = Synthetic
  source 1..23: mol_type = other RNA
tattctgtacaatcatcctgcag

SEQ ID NO: 1853 - DNA, 23 bp, synthetic construct
  misc_feature 1..23: note = Synthetic
  source 1..23: mol_type = other DNA
tgattctgtacaatcatcctgca

SEQ ID NO: 1854 - DNA, 23 bp, synthetic construct
  misc_feature 1..23: note = Synthetic
  source 1..23: mol_type = other DNA
tattcatgcactagtttgataca

SEQ ID NO: 1855 - DNA, 23 bp, synthetic construct
  misc_feature 1..23: note = Synthetic
  source 1..23: mol_type = other DNA
tgcacataaaacaggcacaaaga

SEQ ID NO: 1856 - RNA, 23 nt, synthetic construct
  misc_feature 1..23: note = Synthetic
  source 1..23: mol_type = other RNA
ttgcacataaaacaggcacaaag

SEQ ID NO: 1857 - RNA, 23 nt, synthetic construct
  misc_feature 1..23: note = Synthetic
  source 1..23: mol_type = other RNA
ttctgtacaatcatcctgcagaa

SEQ ID NO: 1858 - DNA, 23 bp, synthetic construct
  misc_feature 1..23: note = Synthetic
  source 1..23: mol_type = other DNA
ttcccattctctcatgacctggg

SEQ ID NO: 1859 - DNA, 23 bp, synthetic construct
  misc_feature 1..23: note = Synthetic
  source 1..23: mol_type = other DNA
tggacgtacttcttcagcatatt

SEQ ID NO: 1860 - RNA, 23 nt, synthetic construct
  misc_feature 1..23: note = Synthetic
  source 1..23: mol_type = other RNA
tcggacgtacttcttcagcatat

SEQ ID NO: 1861 - RNA, 23 nt, synthetic construct
  misc_feature 1..23: note = Synthetic
  source 1..23: mol_type = other RNA
tgggtagtgaagcaatggttttg

SEQ ID NO: 1862 - RNA, 23 nt, synthetic construct
  misc_feature 1..23: note = Synthetic
  source 1..23: mol_type = other RNA
ttgggtagtgaagcaatggtttt

SEQ ID NO: 1863 - DNA, 23 bp, synthetic construct
  misc_feature 1..23: note = Synthetic
  source 1..23: mol_type = other DNA
tatgcctaatgtgtgcacataaa

SEQ ID NO: 1864 - RNA, 23 nt, synthetic construct
  misc_feature 1..23: note = Synthetic
  source 1..23: mol_type = other RNA
tcaatgcctaatgtgtgcacata

SEQ ID NO: 1865 - DNA, 23 bp, synthetic construct
  misc_feature 1..23: note = Synthetic
  source 1..23: mol_type = other DNA
tatgattctgtacaatcatcctg

SEQ ID NO: 1866 - RNA, 23 nt, synthetic construct
  misc_feature 1..23: note = Synthetic
  source 1..23: mol_type = other RNA
tttgcaccagttctggatggtca

SEQ ID NO: 1867 - RNA, 23 nt, synthetic construct
  misc_feature 1..23: note = Synthetic
  source 1..23: mol_type = other RNA
ttgggacattctctctcggtgct

SEQ ID NO: 1868 - RNA, 23 nt, synthetic construct
  misc_feature 1..23: note = Synthetic
  source 1..23: mol_type = other RNA
tccacaagaataatatacaactg

SEQ ID NO: 1869 - RNA, 23 nt, synthetic construct
  misc_feature 1..23: note = Synthetic
  source 1..23: mol_type = other RNA
ttgcctaatgtgtgcacataaaa

SEQ ID NO: 1870 - RNA, 23 nt, synthetic construct
  misc_feature 1..23: note = Synthetic
  source 1..23: mol_type = other RNA
taatgcctaatgtgtgcacataa

SEQ ID NO: 1871 - RNA, 23 nt, synthetic construct
  misc_feature 1..23: note = Synthetic
  source 1..23: mol_type = other RNA
ttcaatgcctaatgtgtgcacat

SEQ ID NO: 1872 - RNA, 23 nt, synthetic construct
  misc_feature 1..23: note = Synthetic
  source 1..23: mol_type = other RNA
tgcaatgattctgtacaatcatc

SEQ ID NO: 1873 - RNA, 23 nt, synthetic construct
  misc_feature 1..23: note = Synthetic
  source 1..23: mol_type = other RNA
tacaccgatgggtagtgaagcaa

SEQ ID NO: 1874 - DNA, 23 bp, synthetic construct
  misc_feature 1..23: note = Synthetic
  source 1..23: mol_type = other DNA
tcctaatgtgtgcacataaaaca

SEQ ID NO: 1875 - RNA, 21 nt, synthetic construct
  misc_feature 1..21: note = Synthetic
  source 1..21: mol_type = other RNA
tagtgcatgaatagattctca

SEQ ID NO: 1876 - RNA, 21 nt, synthetic construct
  misc_feature 1..21: note = Synthetic
  source 1..21: mol_type = other RNA
tagtgcatgaatagattctca

SEQ ID NO: 1877 - DNA, 21 bp, synthetic construct
  misc_feature 1..21: note = Synthetic
  source 1..21: mol_type = other DNA
tagtgcatgaatagattctca

SEQ ID NO: 1878 - RNA, 21 nt, synthetic construct
  misc_feature 1..21: note = Synthetic
  source 1..21: mol_type = other RNA
tagtgcatgaatagattctca

SEQ ID NO: 1879 - RNA, 21 nt, synthetic construct
  misc_feature 1..21: note = Synthetic
  source 1..21: mol_type = other RNA
tagtgcatgaatagattctca

SEQ ID NO: 1880 - RNA, 21 nt, synthetic construct
  misc_feature 1..21: note = Synthetic
  source 1..21: mol_type = other RNA
tagtgcatgaatagattctca

SEQ ID NO: 1881 - RNA, 21 nt, synthetic construct
  misc_feature 1..21: note = Synthetic
  source 1..21: mol_type = other RNA
tagtgcatgaatagattctca

SEQ ID NO: 1882 - RNA, 21 nt, synthetic construct
  misc_feature 1..21: note = Synthetic
  source 1..21: mol_type = other RNA
tagtgcatgaatagattctca

SEQ ID NO: 1883 - RNA, 21 nt, synthetic construct
  misc_feature 1..21: note = Synthetic
  source 1..21: mol_type = other RNA
tagtgcatgaatagattctca

SEQ ID NO: 1884 - RNA, 21 nt, synthetic construct
  misc_feature 1..21: note = Synthetic
  source 1..21: mol_type = other RNA
tagtgcatgaatagattctca

SEQ ID NO: 1885 - RNA, 21 nt, synthetic construct
  misc_feature 1..21: note = Synthetic
  source 1..21: mol_type = other RNA
tagtgcatgaatagattctca

SEQ ID NO: 1886 - RNA, 21 nt, synthetic construct
  misc_feature 1..21: note = Synthetic
  source 1..21: mol_type = other RNA
tagtgcatgaatagattctca

SEQ ID NO: 1887 - RNA, 21 nt, synthetic construct
  misc_feature 1..21: note = Synthetic
  source 1..21: mol_type = other RNA
tagtgcatgaatagattctca

SEQ ID NO: 1888 - RNA, 21 nt, synthetic construct
  misc_feature 1..21: note = Synthetic
  source 1..21: mol_type = other RNA
tagtgcatgaatagattctca

SEQ ID NO: 1889 - RNA, 21 nt, synthetic construct
  misc_feature 1..21: note = Synthetic
  source 1..21: mol_type = other RNA
tagtgcatgaatagattctca

SEQ ID NO: 1890 - RNA, 21 nt, synthetic construct
  misc_feature 1..21: note = Synthetic
  source 1..21: mol_type = other RNA
tagtgcatgaatagattctca

SEQ ID NO: 1891 - RNA, 21 nt, synthetic construct
  misc_feature 1..21: note = Synthetic
  source 1..21: mol_type = other RNA
tagtgcatgaatagattctca

SEQ ID NO: 1892 - RNA, 21 nt, synthetic construct
  misc_feature 1..21: note = Synthetic
  source 1..21: mol_type = other RNA
tagtgcatgaatagattctca

SEQ ID NO: 1893 - RNA, 21 nt, synthetic construct
  misc_feature 1..21: note = Synthetic
  source 1..21: mol_type = other RNA
tagtgcatgaatagattctca

SEQ ID NO: 1894 - RNA, 21 nt, synthetic construct
  misc_feature 1..21: note = Synthetic
  source 1..21: mol_type = other RNA
tagtgcatgaatagattctca

SEQ ID NO: 1895 - RNA, 21 nt, synthetic construct
  misc_feature 1..21: note = Synthetic
  source 1..21: mol_type = other RNA
tagtgcatgaatagattctca

SEQ ID NO: 1896 - RNA, 21 nt, synthetic construct
  misc_feature 1..21: note = Synthetic
  source 1..21: mol_type = other RNA
tagtgcatgaatagattctca

SEQ ID NO: 1897 - RNA, 21 nt, synthetic construct
  misc_feature 1..21: note = Synthetic
  source 1..21: mol_type = other RNA
tagtgcatgaatagattctca

SEQ ID NO: 1898 - RNA, 21 nt, synthetic construct
  misc_feature 1..21: note = Synthetic
  source 1..21: mol_type = other RNA
tagtgcatgaatagattctca

SEQ ID NO: 1899 - RNA, 21 nt, synthetic construct
  misc_feature 1..21: note = Synthetic
  source 1..21: mol_type = other RNA
tagtgcatgaatagattctca

SEQ ID NO: 1900 - RNA, 21 nt, synthetic construct
  misc_feature 1..21: note = Synthetic
  source 1..21: mol_type = other RNA
tagtgcatgaatagattctca

SEQ ID NO: 1901 - RNA, 21 nt, synthetic construct
  misc_feature 1..21: note = Synthetic
  source 1..21: mol_type = other RNA
tagtgcatgaatagattctca

SEQ ID NO: 1902 - RNA, 21 nt, synthetic construct
  misc_feature 1..21: note = Synthetic
  source 1..21: mol_type = other RNA
tagtgcatgaatagattctca

SEQ ID NO: 1903 - RNA, 21 nt, synthetic construct
  misc_feature 1..21: note = Synthetic
  source 1..21: mol_type = other RNA
tagtgcatgaatagattctca

SEQ ID NO: 1904 - RNA, 21 nt, synthetic construct
  misc_feature 1..21: note = Synthetic
  source 1..21: mol_type = other RNA
tagtgcatgaatagattctca

SEQ ID NO: 1905 - RNA, 21 nt, synthetic construct
  misc_feature 1..21: note = Synthetic
  source 1..21: mol_type = other RNA
tagtgcatgaatagattctca

SEQ ID NO: 1906 - RNA, 21 nt, synthetic construct
  misc_feature 1..21: note = Synthetic
  source 1..21: mol_type = other RNA
tagtgcatgaatagattctca

SEQ ID NO: 1907 - RNA, 21 nt, synthetic construct
  misc_feature 1..21: note = Synthetic
  source 1..21: mol_type = other RNA
tagtgcatgaatagattctca

SEQ ID NO: 1908 - RNA, 21 nt, synthetic construct
  misc_feature 1..21: note = Synthetic
  source 1..21: mol_type = other RNA
tagtgcatgaatagattctca

SEQ ID NO: 1909 - RNA, 21 nt, synthetic construct
  misc_feature 1..21: note = Synthetic
  source 1..21: mol_type = other RNA
tagtgcatgaatagattctca

SEQ ID NO: 1910 - RNA, 21 nt, synthetic construct
  misc_feature 1..21: note = Synthetic
  source 1..21: mol_type = other RNA
tagtgcatgaatagattctca

SEQ ID NO: 1911 - RNA, 21 nt, synthetic construct
  misc_feature 1..21: note = Synthetic
  source 1..21: mol_type = other RNA
tagtgcatgaatagattctca

SEQ ID NO: 1912 - RNA, 21 nt, synthetic construct
  misc_feature 1..21: note = Synthetic
  source 1..21: mol_type = other RNA
tagtgcatgaatagattctca

SEQ ID NO: 1913 - RNA, 21 nt, synthetic construct
  misc_feature 1..21: note = Synthetic
  source 1..21: mol_type = other RNA
tagtgcatgaatagattctca

SEQ ID NO: 1914 - RNA, 21 nt, synthetic construct
  misc_feature 1..21: note = Synthetic
  source 1..21: mol_type = other RNA
tagtgcatgaatagattctca

SEQ ID NO: 1915 - RNA, 21 nt, synthetic construct
  misc_feature 1..21: note = Synthetic
  source 1..21: mol_type = other RNA
tagtgcatgaatagattctca

SEQ ID NO: 1916 - RNA, 21 nt, synthetic construct
  misc_feature 1..21: note = Synthetic
  source 1..21: mol_type = other RNA
ggctacgaaaatccaacctaa

SEQ ID NO: 1917 - RNA, 21 nt, synthetic construct
  misc_feature 1..21: note = Synthetic
  source 1..21: mol_type = other RNA
ggctacgaaaatccaacctaa

SEQ ID NO: 1918 - RNA, 21 nt, synthetic construct
  misc_feature 1..21: note = Synthetic
  source 1..21: mol_type = other RNA
ggctacgaaaatccaacctaa

SEQ ID NO: 1919 - RNA, 21 nt, synthetic construct
  misc_feature 1..21: note = Synthetic
  source 1..21: mol_type = other RNA
ggctacgaaaatccaacctaa

SEQ ID NO: 1920 - RNA, 21 nt, synthetic construct
  misc_feature 1..21: note = Synthetic
  source 1..21: mol_type = other RNA
ggctacgaaaatccaacctaa

SEQ ID NO: 1921 - RNA, 21 nt, synthetic construct
  misc_feature 1..21: note = Synthetic
  source 1..21: mol_type = other RNA
ggctacgaaaatccaacctaa

SEQ ID NO: 1922 - RNA, 21 nt, synthetic construct
  misc_feature 1..21: note = Synthetic
  source 1..21: mol_type = other RNA
ggctacgaaaatccaacctaa

SEQ ID NO: 1923 - RNA, 21 nt, synthetic construct
  misc_feature 1..21: note = Synthetic
  source 1..21: mol_type = other RNA
ggctacgaaaatccaacctaa

SEQ ID NO: 1924 - RNA, 21 nt, synthetic construct
  misc_feature 1..21: note = Synthetic
  source 1..21: mol_type = other RNA
ggctacgaaaatccaacctaa

SEQ ID NO: 1925 - RNA, 21 nt, synthetic construct
  misc_feature 1..21: note = Synthetic
  source 1..21: mol_type = other RNA
ggctacgaaaatccaacctaa

SEQ ID NO: 1926 - RNA, 21 nt, synthetic construct
  misc_feature 1..21: note = Synthetic
  source 1..21: mol_type = other RNA
ggctacgaaaatccaacctaa

SEQ ID NO: 1927 - RNA, 21 nt, synthetic construct
  misc_feature 1..21: note = Synthetic
  source 1..21: mol_type = other RNA
ggctacgaaaatccaacctaa

SEQ ID NO: 1928 - RNA, 21 nt, synthetic construct
  misc_feature 1..21: note = Synthetic
  source 1..21: mol_type = other RNA
ggctacgaaaatccaacctaa

SEQ ID NO: 1929 - RNA, 21 nt, synthetic construct
  misc_feature 1..21: note = Synthetic
  source 1..21: mol_type = other RNA
ggctacgaaaatccaacctaa

SEQ ID NO: 1930 - RNA, 21 nt, synthetic construct
  misc_feature 1..21: note = Synthetic
  source 1..21: mol_type = other RNA
ggctacgaaaatccaacctaa

SEQ ID NO: 1931 - RNA, 21 nt, synthetic construct
  misc_feature 1..21: note = Synthetic
  source 1..21: mol_type = other RNA
ggctacgaaaatccaacctaa

SEQ ID NO: 1932 - RNA, 21 nt, synthetic construct
  misc_feature 1..21: note = Synthetic
  source 1..21: mol_type = other RNA
ggctacgaaaatccaacctaa

SEQ ID NO: 1933 - RNA, 21 nt, synthetic construct
  misc_feature 1..21: note = Synthetic
  source 1..21: mol_type = other RNA
ggctacgaaaatccaacctaa

SEQ ID NO: 1934 - RNA, 21 nt, synthetic construct
  misc_feature 1..21: note = Synthetic
  source 1..21: mol_type = other RNA
ggctacgaaaatccaacctaa

SEQ ID NO: 1935 - RNA, 21 nt, synthetic construct
  misc_feature 1..21: note = Synthetic
  source 1..21: mol_type = other RNA
ggctacgaaaatccaacctaa

SEQ ID NO: 1936 - RNA, 21 nt, synthetic construct
  misc_feature 1..21: note = Synthetic
  source 1..21: mol_type = other RNA
ggctacgaaaatccaacctaa

SEQ ID NO: 1937 - RNA, 21 nt, synthetic construct
  misc_feature 1..21: note = Synthetic
  source 1..21: mol_type = other RNA
ggctacgaaaatccaacctaa

SEQ ID NO: 1938 - RNA, 21 nt, synthetic construct
  misc_feature 1..21: note = Synthetic
  source 1..21: mol_type = other RNA
ggctacgaaaatccaacctaa

SEQ ID NO: 1939 - RNA, 21 nt, synthetic construct
  misc_feature 1..21: note = Synthetic
  source 1..21: mol_type = other RNA
ggctacgaaaatccaacctaa

SEQ ID NO: 1940 - RNA, 21 nt, synthetic construct
  misc_feature 1..21: note = Synthetic
  source 1..21: mol_type = other RNA
ggctacgaaaatccaacctaa

SEQ ID NO: 1941 - RNA, 21 nt, synthetic construct
  misc_feature 1..21: note = Synthetic
  source 1..21: mol_type = other RNA
ggctacgaaaatccaacctaa

SEQ ID NO: 1942 - RNA, 21 nt, synthetic construct
  misc_feature 1..21: note = Synthetic
  source 1..21: mol_type = other RNA
ggctacgaaaatccaacctaa

SEQ ID NO: 1943 - RNA, 21 nt, synthetic construct
  misc_feature 1..21: note = Synthetic
  source 1..21: mol_type = other RNA
ggctacgaaaatccaacctaa

SEQ ID NO: 1944 - RNA, 21 nt, synthetic construct
  misc_feature 1..21: note = Synthetic
  source 1..21: mol_type = other RNA
ggctacgaaaatccaacctaa

SEQ ID NO: 1945 - RNA, 21 nt, synthetic construct
  misc_feature 1..21: note = Synthetic
  source 1..21: mol_type = other RNA
ggctacgaaaatccaacctaa

SEQ ID NO: 1946 - RNA, 21 nt, synthetic construct
  misc_feature 1..21: note = Synthetic
  source 1..21: mol_type = other RNA
aaagagcaaaactattcagaa

SEQ ID NO: 1947 - RNA, 21 nt, synthetic construct
  misc_feature 1..21: note = Synthetic
  source 1..21: mol_type = other RNA
aaagagcaaaactattcagaa

SEQ ID NO: 1948 - RNA, 21 nt, synthetic construct
  misc_feature 1..21: note = Synthetic
  source 1..21: mol_type = other RNA
aaagagcaaaactattcagaa

SEQ ID NO: 1949 - RNA, 21 nt, synthetic construct
  misc_feature 1..21: note = Synthetic
  source 1..21: mol_type = other RNA
aaagagcaaaactattcagaa

SEQ ID NO: 1950 - RNA, 21 nt, synthetic construct
  misc_feature 1..21: note = Synthetic
  source 1..21: mol_type = other RNA
aaagagcaaaactattcagaa

SEQ ID NO: 1951 - RNA, 21 nt, synthetic construct
  misc_feature 1..21: note = Synthetic
  source 1..21: mol_type = other RNA
aaagagcaaaactattcagaa

SEQ ID NO: 1952 - RNA, 21 nt, synthetic construct
  misc_feature 1..21: note = Synthetic
  source 1..21: mol_type = other RNA
aaagagcaaaactattcagaa

SEQ ID NO: 1953 - RNA, 21 nt, synthetic construct
  misc_feature 1..21: note = Synthetic
  source 1..21: mol_type = other RNA
aaagagcaaaactattcagaa

SEQ ID NO: 1954 - RNA, 21 nt, synthetic construct
  misc_feature 1..21: note = Synthetic
  source 1..21: mol_type = other RNA
aaagagcaaaactattcagaa

SEQ ID NO: 1955 - RNA, 21 nt, synthetic construct
  misc_feature 1..21: note = Synthetic
  source 1..21: mol_type = other RNA
aaagagcaaaactattcagaa

SEQ ID NO: 1956 - RNA, 21 nt, synthetic construct
  misc_feature 1..21: note = Synthetic
  source 1..21: mol_type = other RNA
aaagagcaaaactattcagaa

SEQ ID NO: 1957 - RNA, 21 nt, synthetic construct
  misc_feature 1..21: note = Synthetic
  source 1..21: mol_type = other RNA
aaagagcaaaactattcagaa

SEQ ID NO: 1958 - RNA, 21 nt, synthetic construct
  misc_feature 1..21: note = Synthetic
  source 1..21: mol_type = other RNA
aaagagcaaaactattcagaa

SEQ ID NO: 1959 - RNA, 21 nt, synthetic construct
  misc_feature 1..21: note = Synthetic
  source 1..21: mol_type = other RNA
aaagagcaaaactattcagaa

SEQ ID NO: 1960 - RNA, 21 nt, synthetic construct
  misc_feature 1..21: note = Synthetic
  source 1..21: mol_type = other RNA
aaagagcaaaactattcagaa

SEQ ID NO: 1961 - RNA, 21 nt, synthetic construct
  misc_feature 1..21: note = Synthetic
  source 1..21: mol_type = other RNA
aaagagcaaaactattcagaa

SEQ ID NO: 1962 - RNA, 21 nt, synthetic construct
  misc_feature 1..21: note = Synthetic
  source 1..21: mol_type = other RNA
aaagagcaaaactattcagaa

SEQ ID NO: 1963 - RNA, 21 nt, synthetic construct
  misc_feature 1..21: note = Synthetic
  source 1..21: mol_type = other RNA
aaagagcaaaactattcagaa

SEQ ID NO: 1964 - RNA, 21 nt, synthetic construct
  misc_feature 1..21: note = Synthetic
  source 1..21: mol_type = other RNA
aaagagcaaaactattcagaa

SEQ ID NO: 1965 - RNA, 21 nt, synthetic construct
  misc_feature 1..21: note = Synthetic
  source 1..21: mol_type = other RNA
tttatgatttactcattatca

SEQ ID NO: 1966 - RNA, 21 nt, synthetic construct
  misc_feature 1..21: note = Synthetic
  source 1..21: mol_type = other RNA
tttatgatttactcattatca

SEQ ID NO: 1967 - RNA, 21 nt, synthetic construct
  misc_feature 1..21: note = Synthetic
  source 1..21: mol_type = other RNA
tttatgatttactcattatca

SEQ ID NO: 1968 - RNA, 21 nt, synthetic construct
  misc_feature 1..21: note = Synthetic
  source 1..21: mol_type = other RNA
tttatgatttactcattatca

SEQ ID NO: 1969 - RNA, 21 nt, synthetic construct
  misc_feature 1..21: note = Synthetic
  source 1..21: mol_type = other RNA
tttatgatttactcattatca

SEQ ID NO: 1970 - RNA, 21 nt, synthetic construct
  misc_feature 1..21: note = Synthetic
  source 1..21: mol_type = other RNA
tttatgatttactcattatca

SEQ ID NO: 1971 - RNA, 21 nt, synthetic construct
  misc_feature 1..21: note = Synthetic
  source 1..21: mol_type = other RNA
tttatgatttactcattatca

SEQ ID NO: 1972 - RNA, 21 nt, synthetic construct
  misc_feature 1..21: note = Synthetic
  source 1..21: mol_type = other RNA
tttatgatttactcattatca

SEQ ID NO: 1973 - RNA, 21 nt, synthetic construct
  misc_feature 1..21: note = Synthetic
  source 1..21: mol_type = other RNA
tttatgatttactcattatca

SEQ ID NO: 1974 - RNA, 21 nt, synthetic construct
  misc_feature 1..21: note = Synthetic
  source 1..21: mol_type = other RNA
tttatgatttactcattatca

SEQ ID NO: 1975 - RNA, 21 nt, synthetic construct
  misc_feature 1..21: note = Synthetic
  source 1..21: mol_type = other RNA
tttatgatttactcattatca

SEQ ID NO: 1976 - RNA, 21 nt, synthetic construct
  misc_feature 1..21: note = Synthetic
  source 1..21: mol_type = other RNA
tttatgatttactcattatca

SEQ ID NO: 1977 - RNA, 21 nt, synthetic construct
  misc_feature 1..21: note = Synthetic
  source 1..21: mol_type = other RNA
tttatgatttactcattatca

SEQ ID NO: 1978 - RNA, 21 nt, synthetic construct
  misc_feature 1..21: note = Synthetic
  source 1..21: mol_type = other RNA
tttatgatttactcattatca

SEQ ID NO: 1979 - RNA, 21 nt, synthetic construct
  misc_feature 1..21: note = Synthetic
  source 1..21: mol_type = other RNA
tttatgatttactcattatca

SEQ ID NO: 1980 - RNA, 21 nt, synthetic construct
  misc_feature 1..21: note = Synthetic
  source 1..21: mol_type = other RNA
tttatgatttactcattatca

SEQ ID NO: 1981 - RNA, 21 nt, synthetic construct
  misc_feature 1..21: note = Synthetic
  source 1..21: mol_type = other RNA
tttatgatttactcattatca

SEQ ID NO: 1982 - RNA, 21 nt, synthetic construct
  misc_feature 1..21: note = Synthetic
  source 1..21: mol_type = other RNA
tttatgatttactcattatca

SEQ ID NO: 1983 - RNA, 21 nt, synthetic construct
  misc_feature 1..21: note = Synthetic
  source 1..21: mol_type = other RNA
tttatgatttactcattatca

SEQ ID NO: 1984 - DNA, 23 bp, synthetic construct
  misc_feature 1..23: note = Synthetic
  source 1..23: mol_type = other DNA
tgagaatctattcatgcactagt

SEQ ID NO: 1985 - DNA, 23 bp, synthetic construct
  misc_feature 1..23: note = Synthetic
  source 1..23: mol_type = other DNA
tgagaatctattcatgcactagt

SEQ ID NO: 1986 - DNA, 23 bp, synthetic construct
  misc_feature 1..23: note = Synthetic
  source 1..23: mol_type = other DNA
tgagaatctattcatgcactagt

SEQ ID NO: 1987 - DNA, 23 bp, synthetic construct
  misc_feature 1..23: note = Synthetic
  source 1..23: mol_type = other DNA
tgagaatctattcatgcactagt

SEQ ID NO: 1988 - DNA, 23 bp, synthetic construct
  misc_feature 1..23: note = Synthetic
  source 1..23: mol_type = other DNA
tgagaatctattcatgcactagt

SEQ ID NO: 1989 - DNA, 23 bp, synthetic construct
  misc_feature 1..23: note = Synthetic
  source 1..23: mol_type = other DNA
tgagaatctattcatgcactagt

SEQ ID NO: 1990 - DNA, 23 bp, synthetic construct
  misc_feature 1..23: note = Synthetic
  source 1..23: mol_type = other DNA
tgagaatctattcatgcactagt

SEQ ID NO: 1991 - DNA, 23 bp, synthetic construct
  misc_feature 1..23: note = Synthetic
  source 1..23: mol_type = other DNA
tgagaatctattcatgcactagt

SEQ ID NO: 1992 - DNA, 23 bp, synthetic construct
  misc_feature 1..23: note = Synthetic
  source 1..23: mol_type = other DNA
tgagaatctattcatgcactagt

SEQ ID NO: 1993 - DNA, 23 bp, synthetic construct
  misc_feature 1..23: note = Synthetic
  source 1..23: mol_type = other DNA
tgagaatctattcatgcactagt

SEQ ID NO: 1994 - DNA, 23 bp, synthetic construct
  misc_feature 1..23: note = Synthetic
  source 1..23: mol_type = other DNA
tgagaatctattcatgcactagt

SEQ ID NO: 1995 - DNA, 23 bp, synthetic construct
  misc_feature 1..23: note = Synthetic
  source 1..23: mol_type = other DNA
tgagaatctattcatgcactagt

SEQ ID NO: 1996 - DNA, 23 bp, synthetic construct
  misc_feature 1..23: note = Synthetic
  source 1..23: mol_type = other DNA
tgagaatctattcatgcactagt

SEQ ID NO: 1997 - DNA, 23 bp, synthetic construct
  misc_feature 1..23: note = Synthetic
  source 1..23: mol_type = other DNA
tgagaatctattcatgcactagt

SEQ ID NO: 1998 - DNA, 23 bp, synthetic construct
  misc_feature 1..23: note = Synthetic
  source 1..23: mol_type = other DNA
tgagaatctattcatgcactagt

SEQ ID NO: 1999 - DNA, 23 bp, synthetic construct
  misc_feature 1..23: note = Synthetic
  source 1..23: mol_type = other DNA
tgagaatctattcatgcactagt

SEQ ID NO: 2000 - DNA, 23 bp, synthetic construct
  misc_feature 1..23: note = Synthetic
  source 1..23: mol_type = other DNA
tgagaatctattcatgcactagt

SEQ ID NO: 2001 - DNA, 23 bp, synthetic construct
  misc_feature 1..23: note = Synthetic
  source 1..23: mol_type = other DNA
tgagaatctattcatgcactagt

SEQ ID NO: 2002 - DNA, 23 bp, synthetic construct
  misc_feature 1..23: note = Synthetic
  source 1..23: mol_type = other DNA
tgagaatctattcatgcactagt

SEQ ID NO: 2003 - DNA, 23 bp, synthetic construct
  misc_feature 1..23: note = Synthetic
  source 1..23: mol_type = other DNA
tgagaatctattcatgcactagt

SEQ ID NO: 2004 - DNA, 23 bp, synthetic construct
  misc_feature 1..23: note = Synthetic
  source 1..23: mol_type = other DNA
tgagaatctattcatgcactagt

SEQ ID NO: 2005 - DNA, 23 bp, synthetic construct
  misc_feature 1..23: note = Synthetic
  source 1..23: mol_type = other DNA
tgagaatctattcatgcactagt

SEQ ID NO: 2006 - DNA, 23 bp, synthetic construct
  misc_feature 1..23: note = Synthetic
  source 1..23: mol_type = other DNA
tgagaatctattcatgcactagt

SEQ ID NO: 2007 - DNA, 23 bp, synthetic construct
  misc_feature 1..23: note = Synthetic
  source 1..23: mol_type = other DNA
tgagaatctattcatgcactagt

SEQ ID NO: 2008 - DNA, 23 bp, synthetic construct
  misc_feature 1..23: note = Synthetic
  source 1..23: mol_type = other DNA
tgagaatctattcatgcactagt

SEQ ID NO: 2009 - DNA, 23 bp, synthetic construct
  misc_feature 1..23: note = Synthetic
  source 1..23: mol_type = other DNA
tgagaatctattcatgcactagt

SEQ ID NO: 2010 - DNA, 23 bp, synthetic construct
  misc_feature 1..23: note = Synthetic
  source 1..23: mol_type = other DNA
tgagaatctattcatgcactagt

SEQ ID NO: 2011 - DNA, 23 bp, synthetic construct
  misc_feature 1..23: note = Synthetic
  source 1..23: mol_type = other DNA
tgagaatctattcatgcactagt

SEQ ID NO: 2012 - DNA, 23 bp, synthetic construct
  misc_feature 1..23: note = Synthetic
  source 1..23: mol_type = other DNA
tgagaatctattcatgcactagt

SEQ ID NO: 2013 - DNA, 23 bp, synthetic construct
  misc_feature 1..23: note = Synthetic
  source 1..23: mol_type = other DNA
tgagaatctattcatgcactagt

SEQ ID NO: 2014 - DNA, 23 bp, synthetic construct
  misc_feature 1..23: note = Synthetic
  source 1..23: mol_type = other DNA
tgagaatctattcatgcactagt

SEQ ID NO: 2015 - DNA, 23 bp, synthetic construct
  misc_feature 1..23: note = Synthetic
  source 1..23: mol_type = other DNA
tgagaatctattcatgcactagt

SEQ ID NO: 2016 - DNA, 23 bp, synthetic construct
  misc_feature 1..23: note = Synthetic
  source 1..23: mol_type = other DNA
tgagaatctattcatgcactagt

SEQ ID NO: 2017 - DNA, 23 bp, synthetic construct
  misc_feature 1..23: note = Synthetic
  source 1..23: mol_type = other DNA
tgagaatctattcatgcactagt

SEQ ID NO: 2018 - DNA, 23 bp, synthetic construct
  misc_feature 1..23: note = Synthetic
  source 1..23: mol_type = other DNA
tgagaatctattcatgcactagt

SEQ ID NO: 2019 - DNA, 23 bp, synthetic construct
  misc_feature 1..23: note = Synthetic
  source 1..23: mol_type = other DNA
tgagaatctattcatgcactagt

SEQ ID NO: 2020 - DNA, 23 bp, synthetic construct
  misc_feature 1..23: note = Synthetic
  source 1..23: mol_type = other DNA
tgagaatctattcatgcactagt

SEQ ID NO: 2021 - DNA, 23 bp, synthetic construct
  misc_feature 1..23: note = Synthetic
  source 1..23: mol_type = other DNA
tgagaatctattcatgcactagt

SEQ ID NO: 2022 - DNA, 23 bp, synthetic construct
  misc_feature 1..23: note = Synthetic
  source 1..23: mol_type = other DNA
tgagaatctattcatgcactatg

SEQ ID NO: 2023 - DNA, 23 bp, synthetic construct
  misc_feature 1..23: note = Synthetic
  source 1..23: mol_type = other DNA
tgagaatctattcatgcactatg

SEQ ID NO: 2024 - DNA, 23 bp, synthetic construct
  misc_feature 1..23: note = Synthetic
  source 1..23: mol_type = other DNA
tgagaatctattcatgcactatg

SEQ ID NO: 2025 - DNA, 23 bp, synthetic construct
  misc_feature 1..23: note = Synthetic
  source 1..23: mol_type = other DNA
ttaggttggattttcgtagccgt

SEQ ID NO: 2026 - DNA, 23 bp, synthetic construct
  misc_feature 1..23: note = Synthetic
  source 1..23: mol_type = other DNA
ttaggttggattttcgtagccgt

SEQ ID NO: 2027 - DNA, 23 bp, synthetic construct
  misc_feature 1..23: note = Synthetic
  source 1..23: mol_type = other DNA
ttaggttggattttcgtagccgt

SEQ ID NO: 2028 - DNA, 23 bp, synthetic construct
  misc_feature 1..23: note = Synthetic
  source 1..23: mol_type = other DNA
ttaggttggattttcgtagccgt

SEQ ID NO: 2029 - DNA, 23 bp, synthetic construct
  misc_feature 1..23: note = Synthetic
  source 1..23: mol_type = other DNA
ttaggttggattttcgtagccgt

SEQ ID NO: 2030 - DNA, 23 bp, synthetic construct
  misc_feature 1..23: note = Synthetic
  source 1..23: mol_type = other DNA
ttaggttggattttcgtagccgt

SEQ ID NO: 2031 - DNA, 23 bp, synthetic construct
  misc_feature 1..23: note = Synthetic
  source 1..23: mol_type = other DNA
ttaggttggattttcgtagccgt

SEQ ID NO: 2032 - DNA, 23 bp, synthetic construct
  misc_feature 1..23: note = Synthetic
  source 1..23: mol_type = other DNA
ttaggttggattttcgtagccgt

SEQ ID NO: 2033 - DNA, 23 bp, synthetic construct
  misc_feature 1..23: note = Synthetic
  source 1..23: mol_type = other DNA
ttaggttggattttcgtagccgt

SEQ ID NO: 2034 - DNA, 23 bp, synthetic construct
  misc_feature 1..23: note = Synthetic
  source 1..23: mol_type = other DNA
ttaggttggattttcgtagccgt

SEQ ID NO: 2035 - DNA, 23 bp, synthetic construct
  misc_feature 1..23: note = Synthetic
  source 1..23: mol_type = other DNA
ttaggttggattttcgtagccgt

SEQ ID NO: 2036 - DNA, 23 bp, synthetic construct
  misc_feature 1..23: note = Synthetic
  source 1..23: mol_type = other DNA
ttaggttggattttcgtagccgt

SEQ ID NO: 2037 - DNA, 23 bp, synthetic construct
  misc_feature 1..23: note = Synthetic
  source 1..23: mol_type = other DNA
ttaggttggattttcgtagccgt

SEQ ID NO: 2038 - DNA, 23 bp, synthetic construct
  misc_feature 1..23: note = Synthetic
  source 1..23: mol_type = other DNA
ttaggttggattttcgtagccgt

SEQ ID NO: 2039 - DNA, 23 bp, synthetic construct
  misc_feature 1..23: note = Synthetic
  source 1..23: mol_type = other DNA
ttaggttggattttcgtagccgt

SEQ ID NO: 2040 - DNA, 23 bp, synthetic construct
  misc_feature 1..23: note = Synthetic
  source 1..23: mol_type = other DNA
ttaggttggattttcgtagccgt

SEQ ID NO: 2041 - DNA, 23 bp, synthetic construct
  misc_feature 1..23: note = Synthetic
  source 1..23: mol_type = other DNA
ttaggttggattttcgtagccgt

SEQ ID NO: 2042 - DNA, 23 bp, synthetic construct
  misc_feature 1..23: note = Synthetic
  source 1..23: mol_type = other DNA
ttaggttggattttcgtagccgt

SEQ ID NO: 2043 - DNA, 23 bp, synthetic construct
  misc_feature 1..23: note = Synthetic
  source 1..23: mol_type = other DNA
ttaggttggattttcgtagccgt

SEQ ID NO: 2044 - DNA, 23 bp, synthetic construct
  misc_feature 1..23: note = Synthetic
  source 1..23: mol_type = other DNA
ttaggttggattttcgtagccgt

SEQ ID NO: 2045 - DNA, 23 bp, synthetic construct
  misc_feature 1..23: note = Synthetic
  source 1..23: mol_type = other DNA
ttaggttggattttcgtagccgt

SEQ ID NO: 2046 - DNA, 23 bp, synthetic construct
  misc_feature 1..23: note = Synthetic
  source 1..23: mol_type = other DNA
ttaggttggattttcgtagccgt

SEQ ID NO: 2047 - DNA, 23 bp, synthetic construct
  misc_feature 1..23: note = Synthetic
  source 1..23: mol_type = other DNA
ttaggttggattttcgtagccgt

SEQ ID NO: 2048 - DNA, 23 bp, synthetic construct
  misc_feature 1..23: note = Synthetic
  source 1..23: mol_type = other DNA
ttaggttggattttcgtagccgt

SEQ ID NO: 2049 - DNA, 23 bp, synthetic construct
  misc_feature 1..23: note = Synthetic
  source 1..23: mol_type = other DNA
ttaggttggattttcgtagccgt

SEQ ID NO: 2050 - DNA, 23 bp, synthetic construct
  misc_feature 1..23: note = Synthetic
  source 1..23: mol_type = other DNA
ttaggttggattttcgtagccgt

SEQ ID NO: 2051 - DNA, 23 bp, synthetic construct
  misc_feature 1..23: note = Synthetic
  source 1..23: mol_type = other DNA
ttaggttggattttcgtagcctg

SEQ ID NO: 2052 - DNA, 23 bp, synthetic construct
  misc_feature 1..23: note = Synthetic
  source 1..23: mol_type = other DNA
ttaggttggattttcgtagcctg

SEQ ID NO: 2053 - DNA, 23 bp, synthetic construct
  misc_feature 1..23: note = Synthetic
  source 1..23: mol_type = other DNA
ttaggttggattttcgtagcctg

SEQ ID NO: 2054 - DNA, 23 bp, synthetic construct
  misc_feature 1..23: note = Synthetic
  source 1..23: mol_type = other DNA
ttaggttggattttcgtagcctg

SEQ ID NO: 2055 - RNA, 23 nt, synthetic construct
  misc_feature 1..23: note = Synthetic
  source 1..23: mol_type = other RNA
ttctgaatagttttgctctttct

SEQ ID NO: 2056 - RNA, 23 nt, synthetic construct
  misc_feature 1..23: note = Synthetic
  source 1..23: mol_type = other RNA
ttctgaatagttttgctctttct

SEQ ID NO: 2057 - RNA, 23 nt, synthetic construct
  misc_feature 1..23: note = Synthetic
  source 1..23: mol_type = other RNA
ttctgaatagttttgctctttct

SEQ ID NO: 2058 - RNA, 23 nt, synthetic construct
  misc_feature 1..23: note = Synthetic
  source 1..23: mol_type = other RNA
ttctgaatagttttgctctttct

SEQ ID NO: 2059 - RNA, 23 nt, synthetic construct
  misc_feature 1..23: note = Synthetic
  source 1..23: mol_type = other RNA
ttctgaatagttttgctctttct

SEQ ID NO: 2060 - RNA, 23 nt, synthetic construct
  misc_feature 1..23: note = Synthetic
  source 1..23: mol_type = other RNA
ttctgaatagttttgctctttct

SEQ ID NO: 2061 - RNA, 23 nt, synthetic construct
  misc_feature 1..23: note = Synthetic
  source 1..23: mol_type = other RNA
ttctgaatagttttgctctttct

SEQ ID NO: 2062 - RNA, 23 nt, synthetic construct
  misc_feature 1..23: note = Synthetic
  source 1..23: mol_type = other RNA
ttctgaatagttttgctctttct

SEQ ID NO: 2063 - RNA, 23 nt, synthetic construct
  misc_feature 1..23: note = Synthetic
  source 1..23: mol_type = other RNA
ttctgaatagttttgctctttct

SEQ ID NO: 2064 - RNA, 23 nt, synthetic construct
  misc_feature 1..23: note = Synthetic
  source 1..23: mol_type = other RNA
ttctgaatagttttgctctttct

SEQ ID NO: 2065 - RNA, 23 nt, synthetic construct
  misc_feature 1..23: note = Synthetic
  source 1..23: mol_type = other RNA
ttctgaatagttttgctctttct

SEQ ID NO: 2066 - RNA, 23 nt, synthetic construct
  misc_feature 1..23: note = Synthetic
  source 1..23: mol_type = other RNA
ttctgaatagttttgctctttct

SEQ ID NO: 2067 - RNA, 23 nt, synthetic construct
  misc_feature 1..23: note = Synthetic
  source 1..23: mol_type = other RNA
ttctgaatagttttgctctttct

SEQ ID NO: 2068 - DNA, 23 bp, synthetic construct
  misc_feature 1..23: note = Synthetic
  source 1..23: mol_type = other DNA
ttctgaatagttttgctctttct

SEQ ID NO: 2069 - DNA, 23 bp, synthetic construct
  misc_feature 1..23: note = Synthetic
  source 1..23: mol_type = other DNA
ttctgaatagttttgctctttct

SEQ ID NO: 2070 - DNA, 23 bp, synthetic construct
  misc_feature 1..23: note = Synthetic
  source 1..23: mol_type = other DNA
ttctgaatagttttgctctttct

SEQ ID NO: 2071 - RNA, 23 nt, synthetic construct
  misc_feature 1..23: note = Synthetic
  source 1..23: mol_type = other RNA
ttctgaatagttttgctcttttg

SEQ ID NO: 2072 - RNA, 23 nt, synthetic construct
  misc_feature 1..23: note = Synthetic
  source 1..23: mol_type = other RNA
ttctgaatagttttgctcttttg

SEQ ID NO: 2073 - RNA, 23 nt, synthetic construct
  misc_feature 1..23: note = Synthetic
  source 1..23: mol_type = other RNA
ttctgaatagttttgctcttttg

SEQ ID NO: 2074 - RNA, 23 nt, synthetic construct
  misc_feature 1..23: note = Synthetic
  source 1..23: mol_type = other RNA
tgataatgagtaaatcataaaac

SEQ ID NO: 2075 - RNA, 23 nt, synthetic construct
  misc_feature 1..23: note = Synthetic
  source 1..23: mol_type = other RNA
tgataatgagtaaatcataaaac

SEQ ID NO: 2076 - RNA, 23 nt, synthetic construct
  misc_feature 1..23: note = Synthetic
  source 1..23: mol_type = other RNA
tgataatgagtaaatcataaaac

SEQ ID NO: 2077 - RNA, 23 nt, synthetic construct
  misc_feature 1..23: note = Synthetic
  source 1..23: mol_type = other RNA
tgataatgagtaaatcataaaac

SEQ ID NO: 2078 - RNA, 23 nt, synthetic construct
  misc_feature 1..23: note = Synthetic
  source 1..23: mol_type = other RNA
tgataatgagtaaatcataaaac

SEQ ID NO: 2079 - RNA, 23 nt, synthetic construct
  misc_feature 1..23: note = Synthetic
  source 1..23: mol_type = other RNA
tgataatgagtaaatcataaaac

SEQ ID NO: 2080 - RNA, 23 nt, synthetic construct
  misc_feature 1..23: note = Synthetic
  source 1..23: mol_type = other RNA
tgataatgagtaaatcataaaac

SEQ ID NO: 2081 - RNA, 23 nt, synthetic construct
  misc_feature 1..23: note = Synthetic
  source 1..23: mol_type = other RNA
tgataatgagtaaatcataaaac

SEQ ID NO: 2082 - RNA, 23 nt, synthetic construct
  misc_feature 1..23: note = Synthetic
  source 1..23: mol_type = other RNA
tgataatgagtaaatcataaaac

SEQ ID NO: 2083 - RNA, 23 nt, synthetic construct
  misc_feature 1..23: note = Synthetic
  source 1..23: mol_type = other RNA
tgataatgagtaaatcataaaac

SEQ ID NO: 2084 - RNA, 23 nt, synthetic construct
  misc_feature 1..23: note = Synthetic
  source 1..23: mol_type = other RNA
tgataatgagtaaatcataaaac

SEQ ID NO: 2085 - RNA, 23 nt, synthetic construct
  misc_feature 1..23: note = Synthetic
  source 1..23: mol_type = other RNA
tgataatgagtaaatcataaaac

SEQ ID NO: 2086 - RNA, 23 nt, synthetic construct
  misc_feature 1..23: note = Synthetic
  source 1..23: mol_type = other RNA
tgataatgagtaaatcataaaac

SEQ ID NO: 2087 - RNA, 23 nt, synthetic construct
  misc_feature 1..23: note = Synthetic
  source 1..23: mol_type = other RNA
tgataatgagtaaatcataaaac

SEQ ID NO: 2088 - RNA, 23 nt, synthetic construct
  misc_feature 1..23: note = Synthetic
  source 1..23: mol_type = other RNA
tgataatgagtaaatcataaaac

SEQ ID NO: 2089 - RNA, 23 nt, synthetic construct
  misc_feature 1..23: note = Synthetic
  source 1..23: mol_type = other RNA
tgataatgagtaaatcataaaac

SEQ ID NO: 2090 - RNA, 23 nt, synthetic construct
  misc_feature 1..23: note = Synthetic
  source 1..23: mol_type = other RNA
tgataatgagtaaatcataaatg

SEQ ID NO: 2091 - RNA, 23 nt, synthetic construct
  misc_feature 1..23: note = Synthetic
  source 1..23: mol_type = other RNA
tgataatgagtaaatcataaatg

SEQ ID NO: 2092 - RNA, 23 nt, synthetic construct
  misc_feature 1..23: note = Synthetic
  source 1..23: mol_type = other RNA
tgataatgagtaaatcataaatg

SEQ ID NO: 2093 - RNA, 21 nt, synthetic construct
  misc_feature 1..21: note = Synthetic
  source 1..21: mol_type = other RNA
tagtgcatgaatagattctca

SEQ ID NO: 2094 - RNA, 21 nt, synthetic construct
  misc_feature 1..21: note = Synthetic
  source 1..21: mol_type = other RNA
tagtgcatgaatagattctca

SEQ ID NO: 2095 - RNA, 21 nt, synthetic construct
  misc_feature 1..21: note = Synthetic
  source 1..21: mol_type = other RNA
tagtgcatgaatagattctca

SEQ ID NO: 2096 - RNA, 21 nt, synthetic construct
  misc_feature 1..21: note = Synthetic
  source 1..21: mol_type = other RNA
tagtgcatgaatagattctca

SEQ ID NO: 2097 - RNA, 21 nt, synthetic construct
  misc_feature 1..21: note = Synthetic
  source 1..21: mol_type = other RNA
tagtgcatgaatagattctca

SEQ ID NO: 2098 - RNA, 21 nt, synthetic construct
  misc_feature 1..21: note = Synthetic
  source 1..21: mol_type = other RNA
tagtgcatgaatagattctca

SEQ ID NO: 2099 - RNA, 21 nt, synthetic construct
  misc_feature 1..21: note = Synthetic
  source 1..21: mol_type = other RNA
tagtgcatgaatagattctca

SEQ ID NO: 2100 - RNA, 21 nt, synthetic construct
  misc_feature 1..21: note = Synthetic
  source 1..21: mol_type = other RNA
tagtgcatgaatagattctca

SEQ ID NO: 2101 - RNA, 21 nt, synthetic construct
  misc_feature 1..21: note = Synthetic
  source 1..21: mol_type = other RNA
tagtgcatgaatagattctca

SEQ ID NO: 2102 - RNA, 21 nt, synthetic construct
  misc_feature 1..21: note = Synthetic
  source 1..21: mol_type = other RNA
tagtgcatgaatagattctca

SEQ ID NO: 2103 - RNA, 21 nt, synthetic construct
  misc_feature 1..21: note = Synthetic
  source 1..21: mol_type = other RNA
tagtgcatgaatagattctca

SEQ ID NO: 2104 - RNA, 21 nt, synthetic construct
  misc_feature 1..21: note = Synthetic
  source 1..21: mol_type = other RNA
tagtgcatgaatagattctca

SEQ ID NO: 2105 - RNA, 21 nt, synthetic construct
  misc_feature 1..21: note = Synthetic
  source 1..21: mol_type = other RNA
tagtgcatgaatagattctca

SEQ ID NO: 2106 - RNA, 21 nt, synthetic construct
  misc_feature 1..21: note = Synthetic
  source 1..21: mol_type = other RNA
tagtgcatgaatagattctca

SEQ ID NO: 2107 - RNA, 21 nt, synthetic construct
  misc_feature 1..21: note = Synthetic
  source 1..21: mol_type = other RNA
tagtgcatgaatagattctca

SEQ ID NO: 2108 - RNA, 21 nt, synthetic construct
  misc_feature 1..21: note = Synthetic
  source 1..21: mol_type = other RNA
tagtgcatgaatagattctca

SEQ ID NO: 2109 - RNA, 21 nt, synthetic construct
  misc_feature 1..21: note = Synthetic
  source 1..21: mol_type = other RNA
tagtgcatgaatagattctca

SEQ ID NO: 2110 - RNA, 21 nt, synthetic construct
  misc_feature 1..21: note = Synthetic
  source 1..21: mol_type = other RNA
tagtgcatgaatagattctca

SEQ ID NO: 2111 - RNA, 21 nt, synthetic construct
  misc_feature 1..21: note = Synthetic
  source 1..21: mol_type = other RNA
tagtgcatgaatagattctca

SEQ ID NO: 2112 - RNA, 21 nt, synthetic construct
  misc_feature 1..21: note = Synthetic
  source 1..21: mol_type = other RNA
tagtgcatgaatagattctca

SEQ ID NO: 2113 - RNA, 21 nt, synthetic construct
  misc_feature 1..21: note = Synthetic
  source 1..21: mol_type = other RNA
tagtgcatgaatagattctca

SEQ ID NO: 2114 - RNA, 21 nt, synthetic construct
  misc_feature 1..21: note = Synthetic
  source 1..21: mol_type = other RNA
tagtgcatgaatagattctca

SEQ ID NO: 2115 - RNA, 21 nt, synthetic construct
  misc_feature 1..21: note = Synthetic
  source 1..21: mol_type = other RNA
tagtgcatgaatagattctca

SEQ ID NO: 2116 - RNA, 21 nt, synthetic construct
  misc_feature 1..21: note = Synthetic
  source 1..21: mol_type = other RNA
tagtgcatgaatagattctca

SEQ ID NO: 2117 - RNA, 21 nt, synthetic construct
  misc_feature 1..21: note = Synthetic
  source 1..21: mol_type = other RNA
tagtgcatgaatagattctca

SEQ ID NO: 2118 - RNA, 21 nt, synthetic construct
  misc_feature 1..21: note = Synthetic
  source 1..21: mol_type = other RNA
tagtgcatgaatagattctca

SEQ ID NO: 2119 - RNA, 21 nt, synthetic construct
  misc_feature 1..21: note = Synthetic
  source 1..21: mol_type = other RNA
tagtgcatgaatagattctca

SEQ ID NO: 2120 - RNA, 21 nt, synthetic construct
  misc_feature 1..21: note = Synthetic
  source 1..21: mol_type = other RNA
tagtgcatgaatagattctca

SEQ ID NO: 2121 - RNA, 21 nt, synthetic construct
  misc_feature 1..21: note = Synthetic
  source 1..21: mol_type = other RNA
tagtgcatgaatagattctca

SEQ ID NO: 2122 - RNA, 21 nt, synthetic construct
  misc_feature 1..21: note = Synthetic
  source 1..21: mol_type = other RNA
tagtgcatgaatagattctca

SEQ ID NO: 2123 - RNA, 21 nt, synthetic construct
  misc_feature 1..21: note = Synthetic
  source 1..21: mol_type = other RNA
tagtgcatgaatagattctca

SEQ ID NO: 2124 - RNA, 21 nt, synthetic construct
  misc_feature 1..21: note = Synthetic
  source 1..21: mol_type = other RNA
tagtgcatgaatagattctca

SEQ ID NO: 2125 - RNA, 21 nt, synthetic construct
  misc_feature 1..21: note = Synthetic
  source 1..21: mol_type = other RNA
tagtgcatgaatagattctca

SEQ ID NO: 2126 - RNA, 21 nt, synthetic construct
  misc_feature 1..21: note = Synthetic
  source 1..21: mol_type = other RNA
tagtgcatgaatagattctca

SEQ ID NO: 2127 - RNA, 21 nt, synthetic construct
  misc_feature 1..21: note = Synthetic
  source 1..21: mol_type = other RNA
tagtgcatgaatagattctca

SEQ ID NO: 2128 - RNA, 21 nt, synthetic construct
  misc_feature 1..21: note = Synthetic
  source 1..21: mol_type = other RNA
tagtgcatgaatagattctca

SEQ ID NO: 2129 - RNA, 21 nt, synthetic construct
  misc_feature 1..21: note = Synthetic
  source 1..21: mol_type = other RNA
tagtgcatgaatagattctca

SEQ ID NO: 2130 - RNA, 21 nt, synthetic construct
  misc_feature 1..21: note = Synthetic
  source 1..21: mol_type = other RNA
tagtgcatgaatagattctca

SEQ ID NO: 2131 - RNA, 21 nt, synthetic construct
  misc_feature 1..21: note = Synthetic
  source 1..21: mol_type = other RNA
tagtgcatgaatagattctca

SEQ ID NO: 2132 - RNA, 21 nt, synthetic construct
  misc_feature 1..21: note = Synthetic
  source 1..21: mol_type = other RNA
tagtgcatgaatagattctca

SEQ ID NO: 2133 - RNA, 21 nt, synthetic construct
  misc_feature 1..21: note = Synthetic
  source 1..21: mol_type = other RNA
tagtgcatgaatagattctca

SEQ ID NO: 2134 - RNA, 21 nt, synthetic construct
  misc_feature 1..21: note = Synthetic
  source 1..21: mol_type = other RNA
ggctacgaaaatccaacctaa

SEQ ID NO: 2135 - RNA, 21 nt, synthetic construct
  misc_feature 1..21: note = Synthetic
  source 1..21: mol_type = other RNA
ggctacgaaaatccaacctaa

SEQ ID NO: 2136 - RNA, 21 nt, synthetic construct
  misc_feature 1..21: note = Synthetic
  source 1..21: mol_type = other RNA
ggctacgaaaatccaacctaa

SEQ ID NO: 2137 - RNA, 21 nt, synthetic construct
  misc_feature 1..21: note = Synthetic
  source 1..21: mol_type = other RNA
ggctacgaaaatccaacctaa

SEQ ID NO: 2138 - RNA, 21 nt, synthetic construct
  misc_feature 1..21: note = Synthetic
  source 1..21: mol_type = other RNA
ggctacgaaaatccaacctaa

SEQ ID NO: 2139 - RNA, 21 nt, synthetic construct
  misc_feature 1..21: note = Synthetic
  source 1..21: mol_type = other RNA
ggctacgaaaatccaacctaa

SEQ ID NO: 2140 - RNA, 21 nt, synthetic construct
  misc_feature 1..21: note = Synthetic
  source 1..21: mol_type = other RNA
ggctacgaaaatccaacctaa

SEQ ID NO: 2141 - RNA, 21 nt, synthetic construct
  misc_feature 1..21: note = Synthetic
  source 1..21: mol_type = other RNA
ggctacgaaaatccaacctaa

SEQ ID NO: 2142 - RNA, 21 nt, synthetic construct
  misc_feature 1..21: note = Synthetic
  source 1..21: mol_type = other RNA
ggctacgaaaatccaacctaa

SEQ ID NO: 2143 - RNA, 21 nt, synthetic construct
  misc_feature 1..21: note = Synthetic
  source 1..21: mol_type = other RNA
ggctacgaaaatccaacctaa

SEQ ID NO: 2144 - RNA, 21 nt, synthetic construct
  misc_feature 1..21: note = Synthetic
  source 1..21: mol_type = other RNA
ggctacgaaaatccaacctaa

SEQ ID NO: 2145 - RNA, 21 nt, synthetic construct
  misc_feature 1..21: note = Synthetic
  source 1..21: mol_type = other RNA
ggctacgaaaatccaacctaa

SEQ ID NO: 2146 - RNA, 21 nt, synthetic construct
  misc_feature 1..21: note = Synthetic
  source 1..21: mol_type = other RNA
ggctacgaaaatccaacctaa

SEQ ID NO: 2147 - RNA, 21 nt, synthetic construct
  misc_feature 1..21: note = Synthetic
  source 1..21: mol_type = other RNA
ggctacgaaaatccaacctaa

SEQ ID NO: 2148 - RNA, 21 nt, synthetic construct
  misc_feature 1..21: note = Synthetic
  source 1..21: mol_type = other RNA
ggctacgaaaatccaacctaa

SEQ ID NO: 2149 - RNA, 21 nt, synthetic construct
  misc_feature 1..21: note = Synthetic
  source 1..21: mol_type = other RNA
ggctacgaaaatccaacctaa

SEQ ID NO: 2150 - RNA, 21 nt, synthetic construct
  misc_feature 1..21: note = Synthetic
  source 1..21: mol_type = other RNA
ggctacgaaaatccaacctaa

SEQ ID NO: 2151 - RNA, 21 nt, synthetic construct
  misc_feature 1..21: note = Synthetic
  source 1..21: mol_type = other RNA
ggctacgaaaatccaacctaa

SEQ ID NO: 2152 - RNA, 21 nt, synthetic construct
  misc_feature 1..21: note = Synthetic
  source 1..21: mol_type = other RNA
ggctacgaaaatccaacctaa

SEQ ID NO: 2153 - RNA, 21 nt, synthetic construct
  misc_feature 1..21: note = Synthetic
  source 1..21: mol_type = other RNA
ggctacgaaaatccaacctaa

SEQ ID NO: 2154 - RNA, 21 nt, synthetic construct
  misc_feature 1..21: note = Synthetic
  source 1..21: mol_type = other RNA
ggctacgaaaatccaacctaa

SEQ ID NO: 2155 - RNA, 21 nt, synthetic construct
  misc_feature 1..21: note = Synthetic
  source 1..21: mol_type = other RNA
ggctacgaaaatccaacctaa

SEQ ID NO: 2156 - RNA, 21 nt, synthetic construct
  misc_feature 1..21: note = Synthetic
  source 1..21: mol_type = other RNA
ggctacgaaaatccaacctaa

SEQ ID NO: 2157 - RNA, 21 nt, synthetic construct
  misc_feature 1..21: note = Synthetic
  source 1..21: mol_type = other RNA
ggctacgaaaatccaacctaa

SEQ ID NO: 2158 - RNA, 21 nt, synthetic construct
  misc_feature 1..21: note = Synthetic
  source 1..21: mol_type = other RNA
ggctacgaaaatccaacctaa

SEQ ID NO: 2159 - RNA, 21 nt, synthetic construct
  misc_feature 1..21: note = Synthetic
  source 1..21: mol_type = other RNA
ggctacgaaaatccaacctaa

SEQ ID NO: 2160 - RNA, 21 nt, synthetic construct
  misc_feature 1..21: note = Synthetic
  source 1..21: mol_type = other RNA
ggctacgaaaatccaacctaa

SEQ ID NO: 2161 - RNA, 21 nt, synthetic construct
  misc_feature 1..21: note = Synthetic
  source 1..21: mol_type = other RNA
ggctacgaaaatccaacctaa

SEQ ID NO: 2162 - RNA, 21 nt, synthetic construct
  misc_feature 1..21: note = Synthetic
  source 1..21: mol_type = other RNA
ggctacgaaaatccaacctaa

SEQ ID NO: 2163 - RNA, 21 nt, synthetic construct
  misc_feature 1..21: note = Synthetic
  source 1..21: mol_type = other RNA
ggctacgaaaatccaacctaa

SEQ ID NO: 2164 - RNA, 21 nt, synthetic construct
  misc_feature 1..21: note = Synthetic
  source 1..21: mol_type = other RNA
aaagagcaaaactattcagaa

SEQ ID NO: 2165 - RNA, 21 nt, synthetic construct
  misc_feature 1..21: note = Synthetic
  source 1..21: mol_type = other RNA
aaagagcaaaactattcagaa

SEQ ID NO: 2166 - RNA, 21 nt, synthetic construct
  misc_feature 1..21: note = Synthetic
  source 1..21: mol_type = other RNA
aaagagcaaaactattcagaa

SEQ ID NO: 2167 - RNA, 21 nt, synthetic construct
  misc_feature 1..21: note = Synthetic
  source 1..21: mol_type = other RNA
aaagagcaaaactattcagaa

SEQ ID NO: 2168 - RNA, 21 nt, synthetic construct
  misc_feature 1..21: note = Synthetic
  source 1..21: mol_type = other RNA
aaagagcaaaactattcagaa

SEQ ID NO: 2169 - RNA, 21 nt, synthetic construct
  misc_feature 1..21: note = Synthetic
  source 1..21: mol_type = other RNA
aaagagcaaaactattcagaa

SEQ ID NO: 2170 - RNA, 21 nt, synthetic construct
  misc_feature 1..21: note = Synthetic
  source 1..21: mol_type = other RNA
aaagagcaaaactattcagaa

SEQ ID NO: 2171 - RNA, 21 nt, synthetic construct
  misc_feature 1..21: note = Synthetic
  source 1..21: mol_type = other RNA
aaagagcaaaactattcagaa

SEQ ID NO: 2172 - RNA, 21 nt, synthetic construct
  misc_feature 1..21: note = Synthetic
  source 1..21: mol_type = other RNA
aaagagcaaaactattcagaa

SEQ ID NO: 2173 - RNA, 21 nt, synthetic construct
  misc_feature 1..21: note = Synthetic
  source 1..21: mol_type = other RNA
aaagagcaaaactattcagaa

SEQ ID NO: 2174 - RNA, 21 nt, synthetic construct
  misc_feature 1..21: note = Synthetic
  source 1..21: mol_type = other RNA
aaagagcaaaactattcagaa

SEQ ID NO: 2175 - RNA, 21 nt, synthetic construct
  misc_feature 1..21: note = Synthetic
  source 1..21: mol_type = other RNA
aaagagcaaaactattcagaa

SEQ ID NO: 2176 - RNA, 21 nt, synthetic construct
  misc_feature 1..21: note = Synthetic
  source 1..21: mol_type = other RNA
aaagagcaaaactattcagaa

SEQ ID NO: 2177 - RNA, 21 nt, synthetic construct
  misc_feature 1..21: note = Synthetic
  source 1..21: mol_type = other RNA
aaagagcaaaactattcagaa

SEQ ID NO: 2178 - RNA, 21 nt, synthetic construct
  misc_feature 1..21: note = Synthetic
  source 1..21: mol_type = other RNA
aaagagcaaaactattcagaa

SEQ ID NO: 2179 - RNA, 21 nt, synthetic construct
  misc_feature 1..21: note = Synthetic
  source 1..21: mol_type = other RNA
aaagagcaaaactattcagaa

SEQ ID NO: 2180 - RNA, 21 nt, synthetic construct
  misc_feature 1..21: note = Synthetic
  source 1..21: mol_type = other RNA
aaagagcaaaactattcagaa

SEQ ID NO: 2181 - RNA, 21 nt, synthetic construct
  misc_feature 1..21: note = Synthetic
  source 1..21: mol_type = other RNA
aaagagcaaaactattcagaa

SEQ ID NO: 2182 - RNA, 21 nt, synthetic construct
  misc_feature 1..21: note = Synthetic
  source 1..21: mol_type = other RNA
aaagagcaaaactattcagaa

SEQ ID NO: 2183 - RNA, 21 nt, synthetic construct
  misc_feature 1..21: note = Synthetic
  source 1..21: mol_type = other RNA
tttatgatttactcattatca

SEQ ID NO: 2184 - RNA, 21 nt, synthetic construct
  misc_feature 1..21: note = Synthetic
  source 1..21: mol_type = other RNA
tttatgatttactcattatca

SEQ ID NO: 2185 - RNA, 21 nt, synthetic construct
  misc_feature 1..21: note = Synthetic
  source 1..21: mol_type = other RNA
tttatgatttactcattatca

SEQ ID NO: 2186 - RNA, 21 nt, synthetic construct
  misc_feature 1..21: note = Synthetic
  source 1..21: mol_type = other RNA
tttatgatttactcattatca

SEQ ID NO: 2187 - RNA, 21 nt, synthetic construct
  misc_feature 1..21: note = Synthetic
  source 1..21: mol_type = other RNA
tttatgatttactcattatca

SEQ ID NO: 2188 - RNA, 21 nt, synthetic construct
  misc_feature 1..21: note = Synthetic
  source 1..21: mol_type = other RNA
tttatgatttactcattatca

SEQ ID NO: 2189 - RNA, 21 nt, synthetic construct
  misc_feature 1..21: note = Synthetic
  source 1..21: mol_type = other RNA
tttatgatttactcattatca

SEQ ID NO: 2190 - RNA, 21 nt, synthetic construct
  misc_feature 1..21: note = Synthetic
  source 1..21: mol_type = other RNA
tttatgatttactcattatca

SEQ ID NO: 2191 - RNA, 21 nt, synthetic construct
  misc_feature 1..21: note = Synthetic
  source 1..21: mol_type = other RNA
tttatgatttactcattatca

SEQ ID NO: 2192 - RNA, 21 nt, synthetic construct
  misc_feature 1..21: note = Synthetic
  source 1..21: mol_type = other RNA
tttatgatttactcattatca

SEQ ID NO: 2193 - RNA, 21 nt, synthetic construct
  misc_feature 1..21: note = Synthetic
  source 1..21: mol_type = other RNA
tttatgatttactcattatca

SEQ ID NO: 2194 - RNA, 21 nt, synthetic construct
  misc_feature 1..21: note = Synthetic
  source 1..21: mol_type = other RNA
tttatgatttactcattatca

SEQ ID NO: 2195 - RNA, 21 nt, synthetic construct
  misc_feature 1..21: note = Synthetic
  source 1..21: mol_type = other RNA
tttatgatttactcattatca

SEQ ID NO: 2196 - RNA, 21 nt, synthetic construct
  misc_feature 1..21: note = Synthetic
  source 1..21: mol_type = other RNA
tttatgatttactcattatca

SEQ ID NO: 2197 - RNA, 21 nt, synthetic construct
  misc_feature 1..21: note = Synthetic
  source 1..21: mol_type = other RNA
tttatgatttactcattatca

SEQ ID NO: 2198 - RNA, 21 nt, synthetic construct
  misc_feature 1..21: note = Synthetic
  source 1..21: mol_type = other RNA
tttatgatttactcattatca

SEQ ID NO: 2199 - RNA, 21 nt, synthetic construct
  misc_feature 1..21: note = Synthetic
  source 1..21: mol_type = other RNA
tttatgatttactcattatca

SEQ ID NO: 2200 - RNA, 21 nt, synthetic construct
  misc_feature 1..21: note = Synthetic
  source 1..21: mol_type = other RNA
tttatgatttactcattatca

SEQ ID NO: 2201 - RNA, 21 nt, synthetic construct
  misc_feature 1..21: note = Synthetic
  source 1..21: mol_type = other RNA
tttatgatttactcattatca

SEQ ID NO: 2202 - DNA, 23 bp, synthetic construct
  misc_feature 1..23: note = Synthetic
  source 1..23: mol_type = other DNA
tgagaatctattcatgcactagt

SEQ ID NO: 2203 - DNA, 23 bp, synthetic construct
  misc_feature 1..23: note = Synthetic
  source 1..23: mol_type = other DNA
tgagaatctattcatgcactagt

SEQ ID NO: 2204 - DNA, 23 bp, synthetic construct
  misc_feature 1..23: note = Synthetic
  source 1..23: mol_type = other DNA
tgagaatctattcatgcactagt

SEQ ID NO: 2205 - DNA, 23 bp, synthetic construct
  misc_feature 1..23: note = Synthetic
  source 1..23: mol_type = other DNA
tgagaatctattcatgcactagt

SEQ ID NO: 2206 - DNA, 23 bp, synthetic construct
  misc_feature 1..23: note = Synthetic
  source 1..23: mol_type = other DNA
tgagaatctattcatgcactagt

SEQ ID NO: 2207 - DNA, 23 bp, synthetic construct
  misc_feature 1..23: note = Synthetic
  source 1..23: mol_type = other DNA
tgagaatctattcatgcactagt

SEQ ID NO: 2208 - DNA, 23 bp, synthetic construct
  misc_feature 1..23: note = Synthetic
  source 1..23: mol_type = other DNA
tgagaatctattcatgcactagt

SEQ ID NO: 2209 - DNA, 23 bp, synthetic construct
  misc_feature 1..23: note = Synthetic
  source 1..23: mol_type = other DNA
tgagaatctattcatgcactagt

SEQ ID NO: 2210 - DNA, 23 bp, synthetic construct
  misc_feature 1..23: note = Synthetic
  source 1..23: mol_type = other DNA
tgagaatctattcatgcactagt

SEQ ID NO: 2211 - DNA, 23 bp, synthetic construct
  misc_feature 1..23: note = Synthetic
  source 1..23: mol_type = other DNA
tgagaatctattcatgcactagt

SEQ ID NO: 2212 - DNA, 23 bp, synthetic construct
  misc_feature 1..23: note = Synthetic
  source 1..23: mol_type = other DNA
tgagaatctattcatgcactagt

SEQ ID NO: 2213 - DNA, 23 bp, synthetic construct
  misc_feature 1..23: note = Synthetic
  source 1..23: mol_type = other DNA
tgagaatctattcatgcactagt

SEQ ID NO: 2214 - DNA, 23 bp, synthetic construct
  misc_feature 1..23: note = Synthetic
  source 1..23: mol_type = other DNA
tgagaatctattcatgcactagt

SEQ ID NO: 2215 - DNA, 23 bp, synthetic construct
  misc_feature 1..23: note = Synthetic
  source 1..23: mol_type = other DNA
tgagaatctattcatgcactagt

SEQ ID NO: 2216 - DNA, 23 bp, synthetic construct
  misc_feature 1..23: note = Synthetic
  source 1..23: mol_type = other DNA
tgagaatctattcatgcactagt

SEQ ID NO: 2217 - DNA, 23 bp, synthetic construct
  misc_feature 1..23: note = Synthetic
  source 1..23: mol_type = other DNA
tgagaatctattcatgcactagt

SEQ ID NO: 2218 - DNA, 23 bp, synthetic construct
  misc_feature 1..23: note = Synthetic
  source 1..23: mol_type = other DNA
tgagaatctattcatgcactagt

SEQ ID NO: 2219 - DNA, 23 bp, synthetic construct
  misc_feature 1..23: note = Synthetic
  source 1..23: mol_type = other DNA
tgagaatctattcatgcactagt

SEQ ID NO: 2220 - DNA, 23 bp, synthetic construct
  misc_feature 1..23: note = Synthetic
  source 1..23: mol_type = other DNA
tgagaatctattcatgcactagt

SEQ ID NO: 2221 - DNA, 23 bp, synthetic construct
  misc_feature 1..23: note = Synthetic
  source 1..23: mol_type = other DNA
tgagaatctattcatgcactagt

SEQ ID NO: 2222 - DNA, 23 bp, synthetic construct
  misc_feature 1..23: note = Synthetic
  source 1..23: mol_type = other DNA
tgagaatctattcatgcactagt

SEQ ID NO: 2223 - DNA, 23 bp, synthetic construct
  misc_feature 1..23: note = Synthetic
  source 1..23: mol_type = other DNA
tgagaatctattcatgcactagt

SEQ ID NO: 2224 - DNA, 23 bp, synthetic construct
  misc_feature 1..23: note = Synthetic
  source 1..23: mol_type = other DNA
tgagaatctattcatgcactagt

SEQ ID NO: 2225 - RNA, 23 nt, synthetic construct
  misc_feature 1..23: note = Synthetic
  source 1..23: mol_type = other RNA
tgagaatctattcatgcactagt

SEQ ID NO: 2226 - DNA, 23 bp, synthetic construct
  misc_feature 1..23: note = Synthetic
  source 1..23: mol_type = other DNA
tgagaatctattcatgcactagt

SEQ ID NO: 2227 - DNA, 23 bp, synthetic construct
  misc_feature 1..23: note = Synthetic
  source 1..23: mol_type = other DNA
tgagaatctattcatgcactagt

SEQ ID NO: 2228 - DNA, 23 bp, synthetic construct
  misc_feature 1..23: note = Synthetic
  source 1..23: mol_type = other DNA
tgagaatctattcatgcactagt

SEQ ID NO: 2229 - DNA, 23 bp, synthetic construct
  misc_feature 1..23: note = Synthetic
  source 1..23: mol_type = other DNA
tgagaatctattcatgcactagt

SEQ ID NO: 2230 - DNA, 23 bp, synthetic construct
  misc_feature 1..23: note = Synthetic
  source 1..23: mol_type = other DNA
tgagaatctattcatgcactagt

SEQ ID NO: 2231 - DNA, 23 bp, synthetic construct
  misc_feature 1..23: note = Synthetic
  source 1..23: mol_type = other DNA
tgagaatctattcatgcactagt

SEQ ID NO: 2232 - DNA, 23 bp, synthetic construct
  misc_feature 1..23: note = Synthetic
  source 1..23: mol_type = other DNA
tgagaatctattcatgcactagt

SEQ ID NO: 2233 - DNA, 23 bp, synthetic construct
  misc_feature 1..23: note = Synthetic
  source 1..23: mol_type = other DNA
tgagaatctattcatgcactagt

SEQ ID NO: 2234 - DNA, 23 bp, synthetic construct
  misc_feature 1..23: note = Synthetic
  source 1..23: mol_type = other DNA
tgagaatctattcatgcactagt

SEQ ID NO: 2235 - DNA, 23 bp, synthetic construct
  misc_feature 1..23: note = Synthetic
  source 1..23: mol_type = other DNA
tgagaatctattcatgcactagt

SEQ ID NO: 2236 - DNA, 23 bp, synthetic construct
  misc_feature 1..23: note = Synthetic
  source 1..23: mol_type = other DNA
tgagaatctattcatgcactagt

SEQ ID NO: 2237 - DNA, 23 bp, synthetic construct
  misc_feature 1..23: note = Synthetic
  source 1..23: mol_type = other DNA
tgagaatctattcatgcactagt

SEQ ID NO: 2238 - DNA, 23 bp, synthetic construct
  misc_feature 1..23: note = Synthetic
  source 1..23: mol_type = other DNA
tgagaatctattcatgcactagt

SEQ ID NO: 2239 - DNA, 23 bp, synthetic construct
  misc_feature 1..23: note = Synthetic
  source 1..23: mol_type = other DNA
tgagaatctattcatgcactagt

SEQ ID NO: 2240 - DNA, 23 bp, synthetic construct
  misc_feature 1..23: note = Synthetic
  source 1..23: mol_type = other DNA
tgagaatctattcatgcactatg

SEQ ID NO: 2241 - DNA, 23 bp, synthetic construct
  misc_feature 1..23: note = Synthetic
  source 1..23: mol_type = other DNA
tgagaatctattcatgcactatg

SEQ ID NO: 2242 - DNA, 23 bp, synthetic construct
  misc_feature 1..23: note = Synthetic
  source 1..23: mol_type = other DNA
tgagaatctattcatgcactatg

SEQ ID NO: 2243 - DNA, 23 bp, synthetic construct
  misc_feature 1..23: note = Synthetic
  source 1..23: mol_type = other DNA
ttaggttggattttcgtagccgt

SEQ ID NO: 2244 - DNA, 23 bp, synthetic construct
  misc_feature 1..23: note = Synthetic
  source 1..23: mol_type = other DNA
ttaggttggattttcgtagccgt

SEQ ID NO: 2245 - DNA, 23 bp, synthetic construct
  misc_feature 1..23: note = Synthetic
  source 1..23: mol_type = other DNA
ttaggttggattttcgtagccgt

SEQ ID NO: 2246 - DNA, 23 bp, synthetic construct
  misc_feature 1..23: note = Synthetic
  source 1..23: mol_type = other DNA
ttaggttggattttcgtagccgt

SEQ ID NO: 2247 - DNA, 23 bp, synthetic construct
  misc_feature 1..23: note = Synthetic
  source 1..23: mol_type = other DNA
ttaggttggattttcgtagccgt

SEQ ID NO: 2248 - DNA, 23 bp, synthetic construct
  misc_feature 1..23: note = Synthetic
  source 1..23: mol_type = other DNA
ttaggttggattttcgtagccgt

SEQ ID NO: 2249 - DNA, 23 bp, synthetic construct
  misc_feature 1..23: note = Synthetic
  source 1..23: mol_type = other DNA
ttaggttggattttcgtagccgt

SEQ ID NO: 2250 - DNA, 23 bp, synthetic construct
  misc_feature 1..23: note = Synthetic
  source 1..23: mol_type = other DNA
ttaggttggattttcgtagccgt

SEQ ID NO: 2251 - DNA, 23 bp, synthetic construct
  misc_feature 1..23: note = Synthetic
  source 1..23: mol_type = other DNA
ttaggttggattttcgtagccgt

SEQ ID NO: 2252 - DNA, 23 bp, synthetic construct
  misc_feature 1..23: note = Synthetic
  source 1..23: mol_type = other DNA
ttaggttggattttcgtagccgt

SEQ ID NO: 2253 - DNA, 23 bp, synthetic construct
  misc_feature 1..23: note = Synthetic
  source 1..23: mol_type = other DNA
ttaggttggattttcgtagccgt

SEQ ID NO: 2254 - DNA, 23 bp, synthetic construct
  misc_feature 1..23: note = Synthetic
  source 1..23: mol_type = other DNA
ttaggttggattttcgtagccgt

SEQ ID NO: 2255 - DNA, 23 bp, synthetic construct
  misc_feature 1..23: note = Synthetic
  source 1..23: mol_type = other DNA
ttaggttggattttcgtagccgt

SEQ ID NO: 2256 - DNA, 23 bp, synthetic construct
  misc_feature 1..23: note = Synthetic
  source 1..23: mol_type = other DNA
ttaggttggattttcgtagccgt

SEQ ID NO: 2257 - DNA, 23 bp, synthetic construct
  misc_feature 1..23: note = Synthetic
  source 1..23: mol_type = other DNA
ttaggttggattttcgtagccgt

SEQ ID NO: 2258 - DNA, 23 bp, synthetic construct
  misc_feature 1..23: note = Synthetic
  source 1..23: mol_type = other DNA
ttaggttggattttcgtagccgt

SEQ ID NO: 2259 - DNA, 23 bp, synthetic construct
  misc_feature 1..23: note = Synthetic
  source 1..23: mol_type = other DNA
ttaggttggattttcgtagccgt

SEQ ID NO: 2260 - DNA, 23 bp, synthetic construct
  misc_feature 1..23: note = Synthetic
  source 1..23: mol_type = other DNA
ttaggttggattttcgtagccgt

SEQ ID NO: 2261 - DNA, 23 bp, synthetic construct
  misc_feature 1..23: note = Synthetic
  source 1..23: mol_type = other DNA
ttaggttggattttcgtagccgt

SEQ ID NO: 2262 - DNA, 23 bp, synthetic construct
  misc_feature 1..23: note = Synthetic
  source 1..23: mol_type = other DNA
ttaggttggattttcgtagccgt

SEQ ID NO: 2263 - DNA, 23 bp, synthetic construct
  misc_feature 1..23: note = Synthetic
  source 1..23: mol_type = other DNA
ttaggttggattttcgtagccgt

SEQ ID NO: 2264 - DNA, 23 bp, synthetic construct
  misc_feature 1..23: note = Synthetic
  source 1..23: mol_type = other DNA
ttaggttggattttcgtagccgt

SEQ ID NO: 2265 - DNA, 23 bp, synthetic construct
  misc_feature 1..23: note = Synthetic
  source 1..23: mol_type = other DNA
ttaggttggattttcgtagccgt

SEQ ID NO: 2266 - DNA, 23 bp, synthetic construct
  misc_feature 1..23: note = Synthetic
  source 1..23: mol_type = other DNA
ttaggttggattttcgtagccgt

SEQ ID NO: 2267 - DNA, 23 bp, synthetic construct
  misc_feature 1..23: note = Synthetic
  source 1..23: mol_type = other DNA
ttaggttggattttcgtagccgt

SEQ ID NO: 2268 - DNA, 23 bp, synthetic construct
  misc_feature 1..23: note = Synthetic
  source 1..23: mol_type = other DNA
ttaggttggattttcgtagccgt

SEQ ID NO: 2269 - DNA, 23 bp, synthetic construct
  misc_feature 1..23: note = Synthetic
  source 1..23: mol_type = other DNA
ttaggttggattttcgtagcctg

SEQ ID NO: 2270 - DNA, 23 bp, synthetic construct
  misc_feature 1..23: note = Synthetic
  source 1..23: mol_type = other DNA
ttaggttggattttcgtagcctg

SEQ ID NO: 2271 - DNA, 23 bp, synthetic construct
  misc_feature 1..23: note = Synthetic
  source 1..23: mol_type = other DNA
ttaggttggattttcgtagcctg

SEQ ID NO: 2272 - DNA, 23 bp, synthetic construct
  misc_feature 1..23: note = Synthetic
  source 1..23: mol_type = other DNA
ttaggttggattttcgtagcctg

SEQ ID NO: 2273 - RNA, 23 nt, synthetic construct
  misc_feature 1..23: note = Synthetic
  source 1..23: mol_type = other RNA
ttctgaatagttttgctctttct

SEQ ID NO: 2274 - RNA, 23 nt, synthetic construct
  misc_feature 1..23: note = Synthetic
  source 1..23: mol_type = other RNA
ttctgaatagttttgctctttct

SEQ ID NO: 2275 - RNA, 23 nt, synthetic construct
  misc_feature 1..23: note = Synthetic
  source 1..23: mol_type = other RNA
ttctgaatagttttgctctttct

SEQ ID NO: 2276 - RNA, 23 nt, synthetic construct
  misc_feature 1..23: note = Synthetic
  source 1..23: mol_type = other RNA
ttctgaatagttttgctctttct

SEQ ID NO: 2277 - RNA, 23 nt, synthetic construct
  misc_feature 1..23: note = Synthetic
  source 1..23: mol_type = other RNA
ttctgaatagttttgctctttct

SEQ ID NO: 2278 - RNA, 23 nt, synthetic construct
  misc_feature 1..23: note = Synthetic
  source 1..23: mol_type = other RNA
ttctgaatagttttgctctttct

SEQ ID NO: 2279 - RNA, 23 nt, synthetic construct
  misc_feature 1..23: note = Synthetic
  source 1..23: mol_type = other RNA
ttctgaatagttttgctctttct

SEQ ID NO: 2280 - RNA, 23 nt, synthetic construct
  misc_feature 1..23: note = Synthetic
  source 1..23: mol_type = other RNA
ttctgaatagttttgctctttct

SEQ ID NO: 2281 - RNA, 23 nt, synthetic construct
  misc_feature 1..23: note = Synthetic
  source 1..23: mol_type = other RNA
ttctgaatagttttgctctttct

SEQ ID NO: 2282 - RNA, 23 nt, synthetic construct
  misc_feature 1..23: note = Synthetic
  source 1..23: mol_type = other RNA
ttctgaatagttttgctctttct

SEQ ID NO: 2283 - RNA, 23 nt, synthetic construct
  misc_feature 1..23: note = Synthetic
  source 1..23: mol_type = other RNA
ttctgaatagttttgctctttct

SEQ ID NO: 2284 - RNA, 23 nt, synthetic construct
  misc_feature 1..23: note = Synthetic
  source 1..23: mol_type = other RNA
ttctgaatagttttgctctttct

SEQ ID NO: 2285 - RNA, 23 nt, synthetic construct
  misc_feature 1..23: note = Synthetic
  source 1..23: mol_type = other RNA
ttctgaatagttttgctctttct

SEQ ID NO: 2286 - DNA, 23 bp, synthetic construct
  misc_feature 1..23: note = Synthetic
  source 1..23: mol_type = other DNA
ttctgaatagttttgctctttct

SEQ ID NO: 2287 - DNA, 23 bp, synthetic construct
  misc_feature 1..23: note = Synthetic
  source 1..23: mol_type = other DNA
ttctgaatagttttgctctttct

SEQ ID NO: 2288 - DNA, 23 bp, synthetic construct
  misc_feature 1..23: note = Synthetic
  source 1..23: mol_type = other DNA
ttctgaatagttttgctctttct

SEQ ID NO: 2289 - RNA, 23 nt, synthetic construct
  misc_feature 1..23: note = Synthetic
  source 1..23: mol_type = other RNA
ttctgaatagttttgctcttttg

SEQ ID NO: 2290 - RNA, 23 nt, synthetic construct
  misc_feature 1..23: note = Synthetic
  source 1..23: mol_type = other RNA
ttctgaatagttttgctcttttg

SEQ ID NO: 2291 - RNA, 23 nt, synthetic construct
  misc_feature 1..23: note = Synthetic
  source 1..23: mol_type = other RNA
ttctgaatagttttgctcttttg

SEQ ID NO: 2292 - RNA, 23 nt, synthetic construct
  misc_feature 1..23: note = Synthetic
  source 1..23: mol_type = other RNA
tgataatgagtaaatcataaaac

SEQ ID NO: 2293 - RNA, 23 nt, synthetic construct
  misc_feature 1..23: note = Synthetic
  source 1..23: mol_type = other RNA
tgataatgagtaaatcataaaac

SEQ ID NO: 2294 - RNA, 23 nt, synthetic construct
  misc_feature 1..23: note = Synthetic
  source 1..23: mol_type = other RNA
tgataatgagtaaatcataaaac

SEQ ID NO: 2295 - RNA, 23 nt, synthetic construct
  misc_feature 1..23: note = Synthetic
  source 1..23: mol_type = other RNA
tgataatgagtaaatcataaaac

SEQ ID NO: 2296 - RNA, 23 nt, synthetic construct
  misc_feature 1..23: note = Synthetic
  source 1..23: mol_type = other RNA
tgataatgagtaaatcataaaac

SEQ ID NO: 2297 - RNA, 23 nt, synthetic construct
  misc_feature 1..23: note = Synthetic
  source 1..23: mol_type = other RNA
tgataatgagtaaatcataaaac

SEQ ID NO: 2298 - RNA, 23 nt, synthetic construct
  misc_feature 1..23: note = Synthetic
  source 1..23: mol_type = other RNA
tgataatgagtaaatcataaaac

SEQ ID NO: 2299 - RNA, 23 nt, synthetic construct
  misc_feature 1..23: note = Synthetic
  source 1..23: mol_type = other RNA
tgataatgagtaaatcataaaac

SEQ ID NO: 2300 - RNA, 23 nt, synthetic construct
  misc_feature 1..23: note = Synthetic
  source 1..23: mol_type = other RNA
tgataatgagtaaatcataaaac

SEQ ID NO: 2301 - RNA, 23 nt, synthetic construct
  misc_feature 1..23: note = Synthetic
  source 1..23: mol_type = other RNA
tgataatgagtaaatcataaaac

SEQ ID NO: 2302 - RNA, 23 nt, synthetic construct
  misc_feature 1..23: note = Synthetic
  source 1..23: mol_type = other RNA
tgataatgagtaaatcataaaac

SEQ ID NO: 2303 - RNA, 23 nt, synthetic construct
  misc_feature 1..23: note = Synthetic
  source 1..23: mol_type = other RNA
tgataatgagtaaatcataaaac

SEQ ID NO: 2304 - RNA, 23 nt, synthetic construct
  misc_feature 1..23: note = Synthetic
  source 1..23: mol_type = other RNA
tgataatgagtaaatcataaaac

SEQ ID NO: 2305 - RNA, 23 nt, synthetic construct
  misc_feature 1..23: note = Synthetic
  source 1..23: mol_type = other RNA
tgataatgagtaaatcataaaac

SEQ ID NO: 2306 - RNA, 23 nt, synthetic construct
  misc_feature 1..23: note = Synthetic
  source 1..23: mol_type = other RNA
tgataatgagtaaatcataaaac

SEQ ID NO: 2307 - RNA, 23 nt, synthetic construct
  misc_feature 1..23: note = Synthetic
  source 1..23: mol_type = other RNA
tgataatgagtaaatcataaaac

SEQ ID NO: 2308 - RNA, 23 nt, synthetic construct
  misc_feature 1..23: note = Synthetic
  source 1..23: mol_type = other RNA
tgataatgagtaaatcataaatg

SEQ ID NO: 2309 - RNA, 23 nt, synthetic construct
  misc_feature 1..23: note = Synthetic
  source 1..23: mol_type = other RNA
tgataatgagtaaatcataaatg

SEQ ID NO: 2310 - RNA, 23 nt, synthetic construct
  misc_feature 1..23: note = Synthetic
  source 1..23: mol_type = other RNA
tgataatgagtaaatcataaatg

SEQ ID NO: 2311 - RNA, 21 nt, synthetic construct
  misc_feature 1..21: note = Synthetic
  source 1..21: mol_type = other RNA
ggctacgaaaatccaacctaa

SEQ ID NO: 2312 - RNA, 21 nt, synthetic construct
  misc_feature 1..21: note = Synthetic
  source 1..21: mol_type = other RNA
aaagagcaaaactattcagaa

SEQ ID NO: 2313 - RNA, 21 nt, synthetic construct
  misc_feature 1..21: note = Synthetic
  source 1..21: mol_type = other RNA
aaagagcaaaactattcagaa

SEQ ID NO: 2314 - RNA, 21 nt, synthetic construct
  misc_feature 1..21: note = Synthetic
  source 1..21: mol_type = other RNA
tttatgatttactcattatca

SEQ ID NO: 2315 - RNA, 21 nt, synthetic construct
  misc_feature 1..21: note = Synthetic
  source 1..21: mol_type = other RNA
ggctacgaaaatccaacctaa

SEQ ID NO: 2316 - RNA, 21 nt, synthetic construct
  misc_feature 1..21: note = Synthetic
  source 1..21: mol_type = other RNA
aaagagcaaaactattcagaa

SEQ ID NO: 2317 - RNA, 21 nt, synthetic construct
  misc_feature 1..21: note = Synthetic
  source 1..21: mol_type = other RNA
aaagagcaaaactattcagaa

SEQ ID NO: 2318 - RNA, 21 nt, synthetic construct
  misc_feature 1..21: note = Synthetic
  source 1..21: mol_type = other RNA
tttatgatttactcattatca

SEQ ID NO: 2319 - DNA, 23 bp, synthetic construct
  misc_feature 1..23: note = Synthetic
  source 1..23: mol_type = other DNA
ttaggttggattttcgtagccgt

SEQ ID NO: 2320 - DNA, 23 bp, synthetic construct
  misc_feature 1..23: note = Synthetic
  source 1..23: mol_type = other DNA
ttctgaatagttttgctctttct

SEQ ID NO: 2321 - DNA, 23 bp, synthetic construct
  misc_feature 1..23: note = Synthetic
  source 1..23: mol_type = other DNA
ttctgaatagttttgctctttct

SEQ ID NO: 2322 - RNA, 23 nt, synthetic construct
  misc_feature 1..23: note = Synthetic
  source 1..23: mol_type = other RNA
tgataatgagtaaatcataaatg

SEQ ID NO: 2323 - DNA, 23 bp, synthetic construct
  misc_feature 1..23: note = Synthetic
  source 1..23: mol_type = other DNA
ttaggttggattttcgtagccgt

SEQ ID NO: 2324 - DNA, 23 bp, synthetic construct
  misc_feature 1..23: note = Synthetic
  source 1..23: mol_type = other DNA
ttctgaatagttttgctctttct

SEQ ID NO: 2325 - DNA, 23 bp, synthetic construct
  misc_feature 1..23: note = Synthetic
  source 1..23: mol_type = other DNA
ttctgaatagttttgctctttct

SEQ ID NO: 2326 - RNA, 23 nt, synthetic construct
  misc_feature 1..23: note = Synthetic
  source 1..23: mol_type = other RNA
tgataatgagtaaatcataaatg

SEQ ID NO: 2327 - RNA, 21 nt, synthetic construct
  misc_feature 1..21: note = Synthetic
  source 1..21: mol_type = other RNA
tagtgcatgaatagattctct

SEQ ID NO: 2328 - RNA, 21 nt, synthetic construct
  misc_feature 1..21: note = Synthetic
  source 1..21: mol_type = other RNA
aaagagcaaaactattcagat

SEQ ID NO: 2329 - RNA, 21 nt, synthetic construct
  misc_feature 1..21: note = Synthetic
  source 1..21: mol_type = other RNA
ttggccaacatgattagtgat

SEQ ID NO: 2330 - RNA, 21 nt, synthetic construct
  misc_feature 1..21: note = Synthetic
  source 1..21: mol_type = other RNA
tctgggttgacaaatatcaat

SEQ ID NO: 2331 - RNA, 21 nt, synthetic construct
  misc_feature 1..21: note = Synthetic
  source 1..21: mol_type = other RNA
tttatgatttactcattatct

SEQ ID NO: 2332 - RNA, 21 nt, synthetic construct
  misc_feature 1..21: note = Synthetic
  source 1..21: mol_type = other RNA
atgcctgaacttgaattaatt

SEQ ID NO: 2333 - RNA, 21 nt, synthetic construct
  misc_feature 1..21: note = Synthetic
  source 1..21: mol_type = other RNA
agatgcctgaacttgaattat

SEQ ID NO: 2334 - RNA, 21 nt, synthetic construct
  misc_feature 1..21: note = Synthetic
  source 1..21: mol_type = other RNA
gcctgaacttgaattaatcct

SEQ ID NO: 2335 - RNA, 21 nt, synthetic construct
  misc_feature 1..21: note = Synthetic
  source 1..21: mol_type = other RNA
gtggtttgtgacccaattaat

SEQ ID NO: 2336 - RNA, 21 nt, synthetic construct
  misc_feature 1..21: note = Synthetic
  source 1..21: mol_type = other RNA
cagatgctttagagagatttt

SEQ ID NO: 2337 - RNA, 21 nt, synthetic construct
  misc_feature 1..21: note = Synthetic
  source 1..21: mol_type = other RNA
tcttgcctaagtattcctttt

SEQ ID NO: 2338 - RNA, 21 nt, synthetic construct
  misc_feature 1..21: note = Synthetic
  source 1..21: mol_type = other RNA
ttgctgcttctgctatatttt

SEQ ID NO: 2339 - DNA, 23 bp, synthetic construct
  misc_feature 1..23: note = Synthetic
  source 1..23: mol_type = other DNA
agagaatctattcatgcactagt

SEQ ID NO: 2340 - RNA, 23 nt, synthetic construct
  misc_feature 1..23: note = Synthetic
  source 1..23: mol_type = other RNA
atctgaatagttttgctctttct

SEQ ID NO: 2341 - RNA, 23 nt, synthetic construct
  misc_feature 1..23: note = Synthetic
  source 1..23: mol_type = other RNA
atcactaatcatgttggccaaga

SEQ ID NO: 2342 - RNA, 23 nt, synthetic construct
  misc_feature 1..23: note = Synthetic
  source 1..23: mol_type = other RNA
attgatatttgtcaacccagaac

SEQ ID NO: 2343 - RNA, 23 nt, synthetic construct
  misc_feature 1..23: note = Synthetic
  source 1..23: mol_type = other RNA
agataatgagtaaatcataaaac

SEQ ID NO: 2344 - RNA, 23 nt, synthetic construct
  misc_feature 1..23: note = Synthetic
  source 1..23: mol_type = other RNA
aattaattcaagttcaggcatct

SEQ ID NO: 2345 - RNA, 23 nt, synthetic construct
  misc_feature 1..23: note = Synthetic
  source 1..23: mol_type = other RNA
ataattcaagttcaggcatctac

SEQ ID NO: 2346 - RNA, 23 nt, synthetic construct
  misc_feature 1..23: note = Synthetic
  source 1..23: mol_type = other RNA
aggattaattcaagttcaggcat

SEQ ID NO: 2347 - RNA, 23 nt, synthetic construct
  misc_feature 1..23: note = Synthetic
  source 1..23: mol_type = other RNA
attaattgggtcacaaaccacaa

SEQ ID NO: 2348 - RNA, 23 nt, synthetic construct
  misc_feature 1..23: note = Synthetic
  source 1..23: mol_type = other RNA
aaaatctctctaaagcatctgaa

SEQ ID NO: 2349 - RNA, 23 nt, synthetic construct
  misc_feature 1..23: note = Synthetic
  source 1..23: mol_type = other RNA
aaaaggaatacttaggcaagaga

SEQ ID NO: 2350 - RNA, 23 nt, synthetic construct
  misc_feature 1..23: note = Synthetic
  source 1..23: mol_type = other RNA
aaaatatagcagaagcagcaatc

SEQ ID NO: 2351 - RNA, 23 nt, synthetic construct
  misc_feature 1..23: note = Synthetic
  source 1..23: mol_type = other RNA
agaaagagcaaaactattcagat

SEQ ID NO: 2352 - RNA, 23 nt, synthetic construct
  misc_feature 1..23: note = Synthetic
  source 1..23: mol_type = other RNA
tcttggccaacatgattagtgaa

SEQ ID NO: 2353 - RNA, 23 nt, synthetic construct
  misc_feature 1..23: note = Synthetic
  source 1..23: mol_type = other RNA
gttctgggttgacaaatatcaag

SEQ ID NO: 2354 - RNA, 23 nt, synthetic construct
  misc_feature 1..23: note = Synthetic
  source 1..23: mol_type = other RNA
gttttatgatttactcattatcg

SEQ ID NO: 2355 - RNA, 23 nt, synthetic construct
  misc_feature 1..23: note = Synthetic
  source 1..23: mol_type = other RNA
agatgcctgaacttgaattaatc

SEQ ID NO: 2356 - RNA, 23 nt, synthetic construct
  misc_feature 1..23: note = Synthetic
  source 1..23: mol_type = other RNA
gtagatgcctgaacttgaattaa

SEQ ID NO: 2357 - RNA, 23 nt, synthetic construct
  misc_feature 1..23: note = Synthetic
  source 1..23: mol_type = other RNA
atgcctgaacttgaattaatcca

SEQ ID NO: 2358 - RNA, 23 nt, synthetic construct
  misc_feature 1..23: note = Synthetic
  source 1..23: mol_type = other RNA
ttgtggtttgtgacccaattaag

SEQ ID NO: 2359 - RNA, 23 nt, synthetic construct
  misc_feature 1..23: note = Synthetic
  source 1..23: mol_type = other RNA
ttcagatgctttagagagatttt

SEQ ID NO: 2360 - RNA, 23 nt, synthetic construct
  misc_feature 1..23: note = Synthetic
  source 1..23: mol_type = other RNA
tctcttgcctaagtattcctttc

SEQ ID NO: 2361 - RNA, 23 nt, synthetic construct
  misc_feature 1..23: note = Synthetic
  source 1..23: mol_type = other RNA
gattgctgcttctgctatatttg

SEQ ID NO: 2362 - RNA, 21 nt, synthetic construct
  misc_feature 1..21: note = Synthetic
  source 1..21: mol_type = other RNA
tagtgcatgaatagattctca

SEQ ID NO: 2363 - DNA, 23 bp, synthetic construct
  misc_feature 1..23: note = Synthetic
  source 1..23: mol_type = other DNA
tgagaatctattcatgcactagt

SEQ ID NO: 2364 - RNA, 21 nt, synthetic construct
  misc_feature 1..21: note = Synthetic
  source 1..21: mol_type = other RNA
tagtgcatgaatagattctca

SEQ ID NO: 2365 - DNA, 23 bp, synthetic construct
  misc_feature 1..23: note = Synthetic
  source 1..23: mol_type = other DNA
tgagaatctattcatgcactagt

SEQ ID NO: 2366 - RNA, 21 nt, synthetic construct
  misc_feature 1..21: note = Synthetic
  source 1..21: mol_type = other RNA
tagtgcatgaatagattctca

SEQ ID NO: 2367 - DNA, 23 bp, synthetic construct
  misc_feature 1..23: note = Synthetic
  source 1..23: mol_type = other DNA
tgagaatctattcatgcactagt

SEQ ID NO: 2368 - RNA, 21 nt, synthetic construct
  misc_feature 1..21: note = Synthetic
  source 1..21: mol_type = other RNA
tagtgcatgaatagattctca

SEQ ID NO: 2369 - DNA, 23 bp, synthetic construct
  misc_feature 1..23: note = Synthetic
  source 1..23: mol_type = other DNA
tgagaatctattcatgcactagt

SEQ ID NO: 2370 - RNA, 21 nt, synthetic construct
  misc_feature 1..21: note = Synthetic
  source 1..21: mol_type = other RNA
tagtgcatgaatagattctca

SEQ ID NO: 2371 - DNA, 23 bp, synthetic construct
  misc_feature 1..23: note = Synthetic
  source 1..23: mol_type = other DNA
tgagaatctattcatgcactagt

SEQ ID NO: 2372 - RNA, 21 nt, synthetic construct
  misc_feature 1..21: note = Synthetic
  source 1..21: mol_type = other RNA
ggctacgaaaatccaacctaa

SEQ ID NO: 2373 - DNA, 23 bp, synthetic construct
  misc_feature 1..23: note = Synthetic
  source 1..23: mol_type = other DNA
ttaggttggattttcgtagccgt

SEQ ID NO: 2374 - RNA, 21 nt, synthetic construct
  misc_feature 1..21: note = Synthetic
  source 1..21: mol_type = other RNA
ggctacgaaaatccaacctaa

SEQ ID NO: 2375 - DNA, 23 bp, synthetic construct
  misc_feature 1..23: note = Synthetic
  source 1..23: mol_type = other DNA
ttaggttggattttcgtagccgt

SEQ ID NO: 2376 - RNA, 21 nt, synthetic construct
  misc_feature 1..21: note = Synthetic
  source 1..21: mol_type = other RNA
ggctacgaaaatccaacctaa

SEQ ID NO: 2377 - DNA, 23 bp, synthetic construct
  misc_feature 1..23: note = Synthetic
  source 1..23: mol_type = other DNA
ttaggttggattttcgtagccgt

SEQ ID NO: 2378 - RNA, 21 nt, synthetic construct
  misc_feature 1..21: note = Synthetic
  source 1..21: mol_type = other RNA
ggctacgaaaatccaacctaa

SEQ ID NO: 2379 - DNA, 23 bp, synthetic construct
  misc_feature 1..23: note = Synthetic
  source 1..23: mol_type = other DNA
ttaggttggattttcgtagccgt

SEQ ID NO: 2380 - RNA, 21 nt, synthetic construct
  misc_feature 1..21: note = Synthetic
  source 1..21: mol_type = other RNA
ggctacgaaaatccaacctaa

SEQ ID NO: 2381 - DNA, 23 bp, synthetic construct
  misc_feature 1..23: note = Synthetic
  source 1..23: mol_type = other DNA
ttaggttggattttcgtagccgt

SEQ ID NO: 2382 - RNA, 21 nt, synthetic construct
  misc_feature 1..21: note = Synthetic
  source 1..21: mol_type = other RNA
ggctacgaaaatccaacctaa

SEQ ID NO: 2383 - DNA, 23 bp, synthetic construct
  misc_feature 1..23: note = Synthetic
  source 1..23: mol_type = other DNA
ttaggttggattttcgtagccgt

SEQ ID NO: 2384 - RNA, 21 nt, synthetic construct
  misc_feature 1..21: note = Synthetic
  source 1..21: mol_type = other RNA
ggctacgaaaatccaacctaa

SEQ ID NO: 2385 - DNA, 23 bp, synthetic construct
  misc_feature 1..23: note = Synthetic
  source 1..23: mol_type = other DNA
ttaggttggattttcgtagccgt

SEQ ID NO: 2386 - RNA, 21 nt, synthetic construct
  misc_feature 1..21: note = Synthetic
  source 1..21: mol_type = other RNA
aaagagcaaaactattcagaa

SEQ ID NO: 2387 - RNA, 23 nt, synthetic construct
  misc_feature 1..23: note = Synthetic
  source 1..23: mol_type = other RNA
ttctgaatagttttgctctttct

SEQ ID NO: 2388 - RNA, 21 nt, synthetic construct
  misc_feature 1..21: note = Synthetic
  source 1..21: mol_type = other RNA
aaagagcaaaactattcagaa

SEQ ID NO: 2389 - RNA, 23 nt, synthetic construct
  misc_feature 1..23: note = Synthetic
  source 1..23: mol_type = other RNA
ttctgaatagttttgctctttct

SEQ ID NO: 2390 - RNA, 21 nt, synthetic construct
  misc_feature 1..21: note = Synthetic
  source 1..21: mol_type = other RNA
aaagagcaaaactattcagaa

SEQ ID NO: 2391 - RNA, 23 nt, synthetic construct
  misc_feature 1..23: note = Synthetic
  source 1..23: mol_type = other RNA
ttctgaatagttttgctctttct

SEQ ID NO: 2392 - RNA, 21 nt, synthetic construct
  misc_feature 1..21: note = Synthetic
  source 1..21: mol_type = other RNA
aaagagcaaaactattcagaa

SEQ ID NO: 2393 - DNA, 23 bp, synthetic construct
  misc_feature 1..23: note = Synthetic
  source 1..23: mol_type = other DNA
ttctgaatagttttgctctttct

SEQ ID NO: 2394 - RNA, 21 nt, synthetic construct
  misc_feature 1..21: note = Synthetic
  source 1..21: mol_type = other RNA
aaagagcaaaactattcagaa

SEQ ID NO: 2395 - DNA, 23 bp, synthetic construct
  misc_feature 1..23: note = Synthetic
  source 1..23: mol_type = other DNA
ttctgaatagttttgctctttct

SEQ ID NO: 2396 - RNA, 21 nt, synthetic construct
  misc_feature 1..21: note = Synthetic
  source 1..21: mol_type = other RNA
aaagagcaaaactattcagaa

SEQ ID NO: 2397 - DNA, 23 bp, synthetic construct
  misc_feature 1..23: note = Synthetic
  source 1..23: mol_type = other DNA
ttctgaatagttttgctctttct

SEQ ID NO: 2398 - RNA, 21 nt, synthetic construct
  misc_feature 1..21: note = Synthetic
  source 1..21: mol_type = other RNA
tttatgatttactcattatca

SEQ ID NO: 2399 - RNA, 23 nt, synthetic construct
  misc_feature 1..23: note = Synthetic
  source 1..23: mol_type = other RNA
tgataatgagtaaatcataaaac

SEQ ID NO: 2400 - RNA, 21 nt, synthetic construct
  misc_feature 1..21: note = Synthetic
  source 1..21: mol_type = other RNA
tttatgatttactcattatca

SEQ ID NO: 2401 - RNA, 23 nt, synthetic construct
  misc_feature 1..23: note = Synthetic
  source 1..23: mol_type = other RNA
tgataatgagtaaatcataaaac

SEQ ID NO: 2402 - RNA, 21 nt, synthetic construct
  misc_feature 1..21: note = Synthetic
  source 1..21: mol_type = other RNA
tttatgatttactcattatca

SEQ ID NO: 2403 - RNA, 23 nt, synthetic construct
  misc_feature 1..23: note = Synthetic
  source 1..23: mol_type = other RNA
tgataatgagtaaatcataaatg

SEQ ID NO: 2404 - RNA, 21 nt, synthetic construct
  misc_feature 1..21: note = Synthetic
  source 1..21: mol_type = other RNA
tttatgatttactcattatca

SEQ ID NO: 2405 - RNA, 23 nt, synthetic construct
  misc_feature 1..23: note = Synthetic
  source 1..23: mol_type = other RNA
tgataatgagtaaatcataaatg

SEQ ID NO: 2406 - RNA, 21 nt, synthetic construct
  misc_feature 1..21: note = Synthetic
  source 1..21: mol_type = other RNA
tagtgcatgaatagattctca

SEQ ID NO: 2407 - DNA, 23 bp, synthetic construct
  misc_feature 1..23: note = Synthetic
  source 1..23: mol_type = other DNA
tgagaatctattcatgcactagt

SEQ ID NO: 2408 - RNA, 21 nt, synthetic construct
  misc_feature 1..21: note = Synthetic
  source 1..21: mol_type = other RNA
tagtgcatgaatagattctca

SEQ ID NO: 2409 - DNA, 23 bp, synthetic construct
  misc_feature 1..23: note = Synthetic
  source 1..23: mol_type = other DNA
tgagaatctattcatgcactagt

SEQ ID NO: 2410 - RNA, 21 nt, synthetic construct
  misc_feature 1..21: note = Synthetic
  source 1..21: mol_type = other RNA
tagtgcatgaatagattctca

SEQ ID NO: 2411 - DNA, 23 bp, synthetic construct
  misc_feature 1..23: note = Synthetic
  source 1..23: mol_type = other DNA
tgagaatctattcatgcactagt

SEQ ID NO: 2412 - RNA, 21 nt, synthetic construct
  misc_feature 1..21: note = Synthetic
  source 1..21: mol_type = other RNA
tagtgcatgaatagattctca

SEQ ID NO: 2413 - DNA, 23 bp, synthetic construct
  misc_feature 1..23: note = Synthetic
  source 1..23: mol_type = other DNA
tgagaatctattcatgcactagt

SEQ ID NO: 2414 - RNA, 21 nt, synthetic construct
  misc_feature 1..21: note = Synthetic
  source 1..21: mol_type = other RNA
tagtgcatgaatagattctca

SEQ ID NO: 2415 - DNA, 23 bp, synthetic construct
  misc_feature 1..23: note = Synthetic
  source 1..23: mol_type = other DNA
tgagaatctattcatgcactagt

SEQ ID NO: 2416 - RNA, 21 nt, synthetic construct
  misc_feature 1..21: note = Synthetic
  source 1..21: mol_type = other RNA
ggctacgaaaatccaacctaa

SEQ ID NO: 2417 - DNA, 23 bp, synthetic construct
  misc_feature 1..23: note = Synthetic
  source 1..23: mol_type = other DNA
ttaggttggattttcgtagccgt

SEQ ID NO: 2418 - RNA, 21 nt, synthetic construct
  misc_feature 1..21: note = Synthetic
  source 1..21: mol_type = other RNA
ggctacgaaaatccaacctaa

SEQ ID NO: 2419 - DNA, 23 bp, synthetic construct
  misc_feature 1..23: note = Synthetic
  source 1..23: mol_type = other DNA
ttaggttggattttcgtagccgt

SEQ ID NO: 2420 - RNA, 21 nt, synthetic construct
  misc_feature 1..21: note = Synthetic
  source 1..21: mol_type = other RNA
ggctacgaaaatccaacctaa

SEQ ID NO: 2421 - DNA, 23 bp, synthetic construct
  misc_feature 1..23: note = Synthetic
  source 1..23: mol_type = other DNA
ttaggttggattttcgtagccgt

SEQ ID NO: 2422 - RNA, 21 nt, synthetic construct
  misc_feature 1..21: note = Synthetic
  source 1..21: mol_type = other RNA
ggctacgaaaatccaacctaa

SEQ ID NO: 2423 - DNA, 23 bp, synthetic construct
  misc_feature 1..23: note = Synthetic
  source 1..23: mol_type = other DNA
ttaggttggattttcgtagccgt

SEQ ID NO: 2424 - RNA, 21 nt, synthetic construct
  misc_feature 1..21: note = Synthetic
  source 1..21: mol_type = other RNA
ggctacgaaaatccaacctaa

SEQ ID NO: 2425 - DNA, 23 bp, synthetic construct
  misc_feature 1..23: note = Synthetic
  source 1..23: mol_type = other DNA
ttaggttggattttcgtagccgt

SEQ ID NO: 2426 - RNA, 21 nt, synthetic construct
  misc_feature 1..21: note = Synthetic
  source 1..21: mol_type = other RNA
ggctacgaaaatccaacctaa

SEQ ID NO: 2427 - DNA, 23 bp, synthetic construct
  misc_feature 1..23: note = Synthetic
  source 1..23: mol_type = other DNA
ttaggttggattttcgtagccgt

SEQ ID NO: 2428 - RNA, 21 nt, synthetic construct
  misc_feature 1..21: note = Synthetic
  source 1..21: mol_type = other RNA
ggctacgaaaatccaacctaa

SEQ ID NO: 2429 - DNA, 23 bp, synthetic construct
  misc_feature 1..23: note = Synthetic
  source 1..23: mol_type = other DNA
ttaggttggattttcgtagccgt

SEQ ID NO: 2430 - RNA, 21 nt, synthetic construct
  misc_feature 1..21: note = Synthetic
  source 1..21: mol_type = other RNA
aaagagcaaaactattcagaa

SEQ ID NO: 2431 - RNA, 23 nt, synthetic construct
  misc_feature 1..23: note = Synthetic
  source 1..23: mol_type = other RNA
ttctgaatagttttgctctttct

SEQ ID NO: 2432 - RNA, 21 nt, synthetic construct
  misc_feature 1..21: note = Synthetic
  source 1..21: mol_type = other RNA
aaagagcaaaactattcagaa

SEQ ID NO: 2433 - RNA, 23 nt, synthetic construct
  misc_feature 1..23: note = Synthetic
  source 1..23: mol_type = other RNA
ttctgaatagttttgctctttct

SEQ ID NO: 2434 - RNA, 21 nt, synthetic construct
  misc_feature 1..21: note = Synthetic
  source 1..21: mol_type = other RNA
aaagagcaaaactattcagaa

SEQ ID NO: 2435 - RNA, 23 nt, synthetic construct
  misc_feature 1..23: note = Synthetic
  source 1..23: mol_type = other RNA
ttctgaatagttttgctctttct

SEQ ID NO: 2436 - RNA, 21 nt, synthetic construct
  misc_feature 1..21: note = Synthetic
  source 1..21: mol_type = other RNA
aaagagcaaaactattcagaa

SEQ ID NO: 2437 - DNA, 23 bp, synthetic construct
  misc_feature 1..23: note = Synthetic
  source 1..23: mol_type = other DNA
ttctgaatagttttgctctttct

SEQ ID NO: 2438 - RNA, 21 nt, synthetic construct
  misc_feature 1..21: note = Synthetic
  source 1..21: mol_type = other RNA
aaagagcaaaactattcagaa

SEQ ID NO: 2439 - DNA, 23 bp, synthetic construct
  misc_feature 1..23: note = Synthetic
  source 1..23: mol_type = other DNA
ttctgaatagttttgctctttct

SEQ ID NO: 2440 - RNA, 21 nt, synthetic construct
  misc_feature 1..21: note = Synthetic
  source 1..21: mol_type = other RNA
aaagagcaaaactattcagaa

SEQ ID NO: 2441 - DNA, 23 bp, synthetic construct
  misc_feature 1..23: note = Synthetic
  source 1..23: mol_type = other DNA
ttctgaatagttttgctctttct

SEQ ID NO: 2442 - RNA, 21 nt, synthetic construct
  misc_feature 1..21: note = Synthetic
  source 1..21: mol_type = other RNA
tttatgatttactcattatca

SEQ ID NO: 2443 - RNA, 23 nt, synthetic construct
  misc_feature 1..23: note = Synthetic
  source 1..23: mol_type = other RNA
tgataatgagtaaatcataaaac

SEQ ID NO: 2444 - RNA, 21 nt, synthetic construct
  misc_feature 1..21: note = Synthetic
  source 1..21: mol_type = other RNA
tttatgatttactcattatca

SEQ ID NO: 2445 - RNA, 23 nt, synthetic construct
  misc_feature 1..23: note = Synthetic
  source 1..23: mol_type = other RNA
tgataatgagtaaatcataaaac

SEQ ID NO: 2446 - RNA, 21 nt, synthetic construct
  misc_feature 1..21: note = Synthetic
  source 1..21: mol_type = other RNA
tttatgatttactcattatca

SEQ ID NO: 2447 - RNA, 23 nt, synthetic construct
  misc_feature 1..23: note = Synthetic
  source 1..23: mol_type = other RNA
tgataatgagtaaatcataaatg

SEQ ID NO: 2448 - RNA, 21 nt, synthetic construct
  misc_feature 1..21: note = Synthetic
  source 1..21: mol_type = other RNA
tttatgatttactcattatca

SEQ ID NO: 2449 - RNA, 23 nt, synthetic construct
  misc_feature 1..23: note = Synthetic
  source 1..23: mol_type = other RNA
tgataatgagtaaatcataaatg

SEQ ID NO: 2450 - RNA, 21 nt, synthetic construct
  misc_feature 1..21: note = Synthetic
  source 1..21: mol_type = other RNA
aaaatccaacctacaagttca

SEQ ID NO: 2451 - DNA, 23 bp, synthetic construct
  misc_feature 1..23: note = Synthetic
  source 1..23: mol_type = other DNA
tgaacttgtaggttggattttcg

SEQ ID NO: 2452 - RNA, 21 nt, synthetic construct
  misc_feature 1..21: note = Synthetic
  source 1..21: mol_type = other RNA
ggctacgaaaatccaacctaa

SEQ ID NO: 2453 - DNA, 23 bp, synthetic construct
  misc_feature 1..23: note = Synthetic
  source 1..23: mol_type = other DNA
ttaggttggattttcgtagccgt

SEQ ID NO: 2454 - RNA, 21 nt, synthetic construct
  misc_feature 1..21: note = Synthetic
  source 1..21: mol_type = other RNA
aaagagcaaaactattcagaa

SEQ ID NO: 2455 - DNA, 23 bp, synthetic construct
  misc_feature 1..23: note = Synthetic
  source 1..23: mol_type = other DNA
ttctgaatagttttgctctttct

SEQ ID NO: 2456 - RNA, 21 nt, synthetic construct
  misc_feature 1..21: note = Synthetic
  source 1..21: mol_type = other RNA
aaagagcaaaactattcagaa

SEQ ID NO: 2457 - DNA, 23 bp, synthetic construct
  misc_feature 1..23: note = Synthetic
  source 1..23: mol_type = other DNA
ttctgaatagttttgctctttct

SEQ ID NO: 2458 - RNA, 21 nt, synthetic construct
  misc_feature 1..21: note = Synthetic
  source 1..21: mol_type = other RNA
tttatgatttactcattatca

SEQ ID NO: 2459 - RNA, 23 nt, synthetic construct
  misc_feature 1..23: note = Synthetic
  source 1..23: mol_type = other RNA
tgataatgagtaaatcataaatg

SEQ ID NO: 2460 - RNA, 23 nt, synthetic construct
  misc_feature 1..23: note = Synthetic
  source 1..23: mol_type = other RNA
cgaaaatccaacctacaagttct

SEQ ID NO: 2461 - RNA, 23 nt, synthetic construct
  misc_feature 1..23: note = Synthetic
  source 1..23: mol_type = other RNA
agaacttgtaggttggattttcg

SEQ ID NO: 2462 - RNA, 23 nt, synthetic construct
  misc_feature 1..23: note = Synthetic
  source 1..23: mol_type = other RNA
acggctacgaaaatccaacctac

SEQ ID NO: 2463 - RNA, 23 nt, synthetic construct
  misc_feature 1..23: note = Synthetic
  source 1..23: mol_type = other RNA
gtaggttggattttcgtagccgt

SEQ ID NO: 2464 - RNA, 23 nt, synthetic construct
  misc_feature 1..23: note = Synthetic
  source 1..23: mol_type = other RNA
agaaagagcaaaactattcagat

SEQ ID NO: 2465 - RNA, 23 nt, synthetic construct
  misc_feature 1..23: note = Synthetic
  source 1..23: mol_type = other RNA
atctgaatagttttgctctttct

SEQ ID NO: 2466 - RNA, 23 nt, synthetic construct
  misc_feature 1..23: note = Synthetic
  source 1..23: mol_type = other RNA
agaaagagcaaaactattcagat

SEQ ID NO: 2467 - RNA, 23 nt, synthetic construct
  misc_feature 1..23: note = Synthetic
  source 1..23: mol_type = other RNA
atctgaatagttttgctctttct

SEQ ID NO: 2468 - RNA, 23 nt, synthetic construct
  misc_feature 1..23: note = Synthetic
  source 1..23: mol_type = other RNA
gttttatgatttactcattatcg

SEQ ID NO: 2469 - RNA, 23 nt, synthetic construct
  misc_feature 1..23: note = Synthetic
  source 1..23: mol_type = other RNA
cgataatgagtaaatcataaaac

SEQ ID NO: 2470 - RNA, 21 nt, synthetic construct
  misc_feature 1..21: note = Synthetic
  source 1..21: mol_type = other RNA
aaaatccaacctacaagttca

SEQ ID NO: 2471 - DNA, 23 bp, synthetic construct
  misc_feature 1..23: note = Synthetic
  source 1..23: mol_type = other DNA
tgaacttgtaggttggattttcg

SEQ ID NO: 2472 - RNA, 21 nt, synthetic construct
  misc_feature 1..21: note = Synthetic
  source 1..21: mol_type = other RNA
ggctacgaaaatccaacctaa

SEQ ID NO: 2473 - DNA, 23 bp, synthetic construct
  misc_feature 1..23: note = Synthetic
  source 1..23: mol_type = other DNA
ttaggttggattttcgtagccgt

SEQ ID NO: 2474 - RNA, 21 nt, synthetic construct
  misc_feature 1..21: note = Synthetic
  source 1..21: mol_type = other RNA
aaagagcaaaactattcagaa

SEQ ID NO: 2475 - DNA, 23 bp, synthetic construct
  misc_feature 1..23: note = Synthetic
  source 1..23: mol_type = other DNA
ttctgaatagttttgctctttct

SEQ ID NO: 2476 - RNA, 21 nt, synthetic construct
  misc_feature 1..21: note = Synthetic
  source 1..21: mol_type = other RNA
aaagagcaaaactattcagaa

SEQ ID NO: 2477 - DNA, 23 bp, synthetic construct
  misc_feature 1..23: note = Synthetic
  source 1..23: mol_type = other DNA
ttctgaatagttttgctctttct

SEQ ID NO: 2478 - RNA, 21 nt, synthetic construct
  misc_feature 1..21: note = Synthetic
  source 1..21: mol_type = other RNA
tttatgatttactcattatca

SEQ ID NO: 2479 - RNA, 23 nt, synthetic construct
  misc_feature 1..23: note = Synthetic
  source 1..23: mol_type = other RNA
tgataatgagtaaatcataaatg

SEQ ID NO: 2480 - RNA, 21 nt, synthetic construct
  misc_feature 1..21: note = Synthetic
  source 1..21: mol_type = other RNA
catgttctgtggtaaactcaa

SEQ ID NO: 2481 - RNA, 21 nt, synthetic construct
  misc_feature 1..21: note = Synthetic
  source 1..21: mol_type = other RNA
tgttctgtggtaaactcaaca

SEQ ID NO: 2482 - RNA, 21 nt, synthetic construct
  misc_feature 1..21: note = Synthetic
  source 1..21: mol_type = other RNA
atgttctgtggtaaactcaaa

SEQ ID NO: 2483 - RNA, 21 nt, synthetic construct
  misc_feature 1..21: note = Synthetic
  source 1..21: mol_type = other RNA
ctgtggtaaactcaacatgca

SEQ ID NO: 2484 - RNA, 21 nt, synthetic construct
  misc_feature 1..21: note = Synthetic
  source 1..21: mol_type = other RNA
ggtaaactcaacatgcacata

SEQ ID NO: 2485 - RNA, 21 nt, synthetic construct
  misc_feature 1..21: note = Synthetic
  source 1..21: mol_type = other RNA
tgtggtaaactcaacatgcaa

SEQ ID NO: 2486 - RNA, 21 nt, synthetic construct
  misc_feature 1..21: note = Synthetic
  source 1..21: mol_type = other RNA
gaagagcactaacttgcacga

SEQ ID NO: 2487 - RNA, 21 nt, synthetic construct
  misc_feature 1..21: note = Synthetic
  source 1..21: mol_type = other RNA
ccgctggtactttgatgtcaa

SEQ ID NO: 2488 - RNA, 21 nt, synthetic construct
  misc_feature 1..21: note = Synthetic
  source 1..21: mol_type = other RNA
ccatgttctgtggtaaactca

SEQ ID NO: 2489 - RNA, 21 nt, synthetic construct
  misc_feature 1..21: note = Synthetic
  source 1..21: mol_type = other RNA
gtggtaaactcaacatgcaca

SEQ ID NO: 2490 - RNA, 21 nt, synthetic construct
  misc_feature 1..21: note = Synthetic
  source 1..21: mol_type = other RNA
gaactgcagatcacaaacgta

SEQ ID NO: 2491 - RNA, 21 nt, synthetic construct
  misc_feature 1..21: note = Synthetic
  source 1..21: mol_type = other RNA
aagagcactaacttgcacgaa

SEQ ID NO: 2492 - RNA, 21 nt, synthetic construct
  misc_feature 1..21: note = Synthetic
  source 1..21: mol_type = other RNA
agcactaacttgcacgactaa

SEQ ID NO: 2493 - RNA, 21 nt, synthetic construct
  misc_feature 1..21: note = Synthetic
  source 1..21: mol_type = other RNA
gcactaacttgcacgactata

SEQ ID NO: 2494 - RNA, 21 nt, synthetic construct
  misc_feature 1..21: note = Synthetic
  source 1..21: mol_type = other RNA
aaagtttactcaagactacca

SEQ ID NO: 2495 - RNA, 21 nt, synthetic construct
  misc_feature 1..21: note = Synthetic
  source 1..21: mol_type = other RNA
cgcatgaaccagtctctgtca

SEQ ID NO: 2496 - RNA, 21 nt, synthetic construct
  misc_feature 1..21: note = Synthetic
  source 1..21: mol_type = other RNA
cacatcgtgattccttaccga

SEQ ID NO: 2497 - RNA, 21 nt, synthetic construct
  misc_feature 1..21: note = Synthetic
  source 1..21: mol_type = other RNA
atgctgaagaagtacgtccga

SEQ ID NO: 2498 - RNA, 21 nt, synthetic construct
  misc_feature 1..21: note = Synthetic
  source 1..21: mol_type = other RNA
gagcgcatgaaccagtctcta

SEQ ID NO: 2499 - RNA, 21 nt, synthetic construct
  misc_feature 1..21: note = Synthetic
  source 1..21: mol_type = other RNA
gagcagaactactccgacgaa

SEQ ID NO: 2500 - RNA, 21 nt, synthetic construct
  misc_feature 1..21: note = Synthetic
  source 1..21: mol_type = other RNA
cacccacatcgtgattcctta

SEQ ID NO: 2501 - RNA, 21 nt, synthetic construct
  misc_feature 1..21: note = Synthetic
  source 1..21: mol_type = other RNA
agagcactaacttgcacgaca

SEQ ID NO: 2502 - RNA, 21 nt, synthetic construct
  misc_feature 1..21: note = Synthetic
  source 1..21: mol_type = other RNA
cactaacttgcacgactatga

SEQ ID NO: 2503 - RNA, 21 nt, synthetic construct
  misc_feature 1..21: note = Synthetic
  source 1..21: mol_type = other RNA
ctcaagactaccagtgaacca

SEQ ID NO: 2504 - RNA, 21 nt, synthetic construct
  misc_feature 1..21: note = Synthetic
  source 1..21: mol_type = other RNA
agcacaccctaaagcatttta

SEQ ID NO: 2505 - RNA, 21 nt, synthetic construct
  misc_feature 1..21: note = Synthetic
  source 1..21: mol_type = other RNA
aaggagcagaactactccgaa

SEQ ID NO: 2506 - RNA, 21 nt, synthetic construct
  misc_feature 1..21: note = Synthetic
  source 1..21: mol_type = other RNA
ggagcagaactactccgacga

SEQ ID NO: 2507 - RNA, 21 nt, synthetic construct
  misc_feature 1..21: note = Synthetic
  source 1..21: mol_type = other RNA
gaaacagtacacatccatcca

SEQ ID NO: 2508 - RNA, 21 nt, synthetic construct
  misc_feature 1..21: note = Synthetic
  source 1..21: mol_type = other RNA
ctgaactgcagatcacaaaca

SEQ ID NO: 2509 - RNA, 21 nt, synthetic construct
  misc_feature 1..21: note = Synthetic
  source 1..21: mol_type = other RNA
ccacatcgtgattccttacca

SEQ ID NO: 2510 - RNA, 21 nt, synthetic construct
  misc_feature 1..21: note = Synthetic
  source 1..21: mol_type = other RNA
gtgcccgacaagtgcaagtta

SEQ ID NO: 2511 - RNA, 21 nt, synthetic construct
  misc_feature 1..21: note = Synthetic
  source 1..21: mol_type = other RNA
gactaccagtgaacctcttca

SEQ ID NO: 2512 - RNA, 21 nt, synthetic construct
  misc_feature 1..21: note = Synthetic
  source 1..21: mol_type = other RNA
gtccgccatcaaaaactggta

SEQ ID NO: 2513 - RNA, 21 nt, synthetic construct
  misc_feature 1..21: note = Synthetic
  source 1..21: mol_type = other RNA
ggccctcgagaattacatcaa

SEQ ID NO: 2514 - RNA, 21 nt, synthetic construct
  misc_feature 1..21: note = Synthetic
  source 1..21: mol_type = other RNA
catgctgaagaagtacgtcca

SEQ ID NO: 2515 - RNA, 21 nt, synthetic construct
  misc_feature 1..21: note = Synthetic
  source 1..21: mol_type = other RNA
tgctgaagaagtacgtccgta

SEQ ID NO: 2516 - RNA, 21 nt, synthetic construct
  misc_feature 1..21: note = Synthetic
  source 1..21: mol_type = other RNA
tccgccatcaaaaactggtga

SEQ ID NO: 2517 - RNA, 21 nt, synthetic construct
  misc_feature 1..21: note = Synthetic
  source 1..21: mol_type = other RNA
ttgcacgactatggcatgcta

SEQ ID NO: 2518 - RNA, 21 nt, synthetic construct
  misc_feature 1..21: note = Synthetic
  source 1..21: mol_type = other RNA
tcccaggtcatgagagaatga

SEQ ID NO: 2519 - RNA, 21 nt, synthetic construct
  misc_feature 1..21: note = Synthetic
  source 1..21: mol_type = other RNA
ctgaagaagtacgtccgtgca

SEQ ID NO: 2520 - RNA, 21 nt, synthetic construct
  misc_feature 1..21: note = Synthetic
  source 1..21: mol_type = other RNA
cgtgtgatctacgagcgcata

SEQ ID NO: 2521 - RNA, 21 nt, synthetic construct
  misc_feature 1..21: note = Synthetic
  source 1..21: mol_type = other RNA
tactgccaagaggtctaccca

SEQ ID NO: 2522 - RNA, 21 nt, synthetic construct
  misc_feature 1..21: note = Synthetic
  source 1..21: mol_type = other RNA
caccgagagagaatgtcccaa

SEQ ID NO: 2523 - RNA, 21 nt, synthetic construct
  misc_feature 1..21: note = Synthetic
  source 1..21: mol_type = other RNA
caaggcctcatcatgtgttca

SEQ ID NO: 2524 - RNA, 21 nt, synthetic construct
  misc_feature 1..21: note = Synthetic
  source 1..21: mol_type = other RNA
gctgaagaagtacgtccgtga

SEQ ID NO: 2525 - RNA, 21 nt, synthetic construct
  misc_feature 1..21: note = Synthetic
  source 1..21: mol_type = other RNA
aagcattttgaacatgtgcga

SEQ ID NO: 2526 - RNA, 21 nt, synthetic construct
  misc_feature 1..21: note = Synthetic
  source 1..21: mol_type = other RNA
cacctccgtgtgatctacgaa

SEQ ID NO: 2527 - RNA, 21 nt, synthetic construct
  misc_feature 1..21: note = Synthetic
  source 1..21: mol_type = other RNA
gaaggagcagaactactccga

SEQ ID NO: 2528 - RNA, 21 nt, synthetic construct
  misc_feature 1..21: note = Synthetic
  source 1..21: mol_type = other RNA
gaagaaacagtacacatccaa

SEQ ID NO: 2529 - RNA, 21 nt, synthetic construct
  misc_feature 1..21: note = Synthetic
  source 1..21: mol_type = other RNA
gtactgccaagaggtctacca

SEQ ID NO: 2530 - RNA, 21 nt, synthetic construct
  misc_feature 1..21: note = Synthetic
  source 1..21: mol_type = other RNA
actgccaagaggtctacccta

SEQ ID NO: 2531 - RNA, 21 nt, synthetic construct
  misc_feature 1..21: note = Synthetic
  source 1..21: mol_type = other RNA
actaacttgcacgactatgga

SEQ ID NO: 2532 - RNA, 21 nt, synthetic construct
  misc_feature 1..21: note = Synthetic
  source 1..21: mol_type = other RNA
gtcccattcttttacggcgga

SEQ ID NO: 2533 - RNA, 21 nt, synthetic construct
  misc_feature 1..21: note = Synthetic
  source 1..21: mol_type = other RNA
aagctgacaagaaggccgtta

SEQ ID NO: 2534 - RNA, 21 nt, synthetic construct
  misc_feature 1..21: note = Synthetic
  source 1..21: mol_type = other RNA
tgacaagaaggccgttatcca

SEQ ID NO: 2535 - RNA, 21 nt, synthetic construct
  misc_feature 1..21: note = Synthetic
  source 1..21: mol_type = other RNA
agcattttgaacatgtgcgca

SEQ ID NO: 2536 - RNA, 21 nt, synthetic construct
  misc_feature 1..21: note = Synthetic
  source 1..21: mol_type = other RNA
tgtgatctacgagcgcatgaa

SEQ ID NO: 2537 - RNA, 21 nt, synthetic construct
  misc_feature 1..21: note = Synthetic
  source 1..21: mol_type = other RNA
cagcgagaagagcactaacta

SEQ ID NO: 2538 - RNA, 21 nt, synthetic construct
  misc_feature 1..21: note = Synthetic
  source 1..21: mol_type = other RNA
agcgtgtcaacccaaagttta

SEQ ID NO: 2539 - RNA, 21 nt, synthetic construct
  misc_feature 1..21: note = Synthetic
  source 1..21: mol_type = other RNA
tgtcaacccaaagtttactca

SEQ ID NO: 2540 - RNA, 21 nt, synthetic construct
  misc_feature 1..21: note = Synthetic
  source 1..21: mol_type = other RNA
tgtcccattcttttacggcga

SEQ ID NO: 2541 - RNA, 21 nt, synthetic construct
  misc_feature 1..21: note = Synthetic
  source 1..21: mol_type = other RNA
gtgtcaacccaaagtttacta

SEQ ID NO: 2542 - RNA, 21 nt, synthetic construct
  misc_feature 1..21: note = Synthetic
  source 1..21: mol_type = other RNA
aagatcctgataaacttccca

SEQ ID NO: 2543 - RNA, 21 nt, synthetic construct
  misc_feature 1..21: note = Synthetic
  source 1..21: mol_type = other RNA
agatcctgataaacttcccaa

SEQ ID NO: 2544 - RNA, 21 nt, synthetic construct
  misc_feature 1..21: note = Synthetic
  source 1..21: mol_type = other RNA
cttaccgttgcctagttggta

SEQ ID NO: 2545 - RNA, 21 nt, synthetic construct
  misc_feature 1..21: note = Synthetic
  source 1..21: mol_type = other RNA
gtgtgtcccattcttttacga

SEQ ID NO: 2546 - RNA, 21 nt, synthetic construct
  misc_feature 1..21: note = Synthetic
  source 1..21: mol_type = other RNA
gtgtcccattcttttacggca

SEQ ID NO: 2547 - RNA, 21 nt, synthetic construct
  misc_feature 1..21: note = Synthetic
  source 1..21: mol_type = other RNA
catagcaaccgtgattgtcaa

SEQ ID NO: 2548 - RNA, 21 nt, synthetic construct
  misc_feature 1..21: note = Synthetic
  source 1..21: mol_type = other RNA
gaacggatatgagaatccaaa

SEQ ID NO: 2549 - RNA, 21 nt, synthetic construct
  misc_feature 1..21: note = Synthetic
  source 1..21: mol_type = other RNA
tgtgtcccattcttttacgga

SEQ ID NO: 2550 - RNA, 21 nt, synthetic construct
  misc_feature 1..21: note = Synthetic
  source 1..21: mol_type = other RNA
gcaaccgtgattgtcatcaca

SEQ ID NO: 2551 - RNA, 21 nt, synthetic construct
  misc_feature 1..21: note = Synthetic
  source 1..21: mol_type = other RNA
gcagcgagaagagcactaaca

SEQ ID NO: 2552 - RNA, 21 nt, synthetic construct
  misc_feature 1..21: note = Synthetic
  source 1..21: mol_type = other RNA
cagaattcggacatgattcaa

SEQ ID NO: 2553 - RNA, 21 nt, synthetic construct
  misc_feature 1..21: note = Synthetic
  source 1..21: mol_type = other RNA
tcctgataaacttcccacgaa

SEQ ID NO: 2554 - RNA, 21 nt, synthetic construct
  misc_feature 1..21: note = Synthetic
  source 1..21: mol_type = other RNA
agaacggatatgagaatccaa

SEQ ID NO: 2555 - RNA, 21 nt, synthetic construct
  misc_feature 1..21: note = Synthetic
  source 1..21: mol_type = other RNA
ccttaccgttgcctagttgga

SEQ ID NO: 2556 - RNA, 21 nt, synthetic construct
  misc_feature 1..21: note = Synthetic
  source 1..21: mol_type = other RNA
atcctgataaacttcccacga

SEQ ID NO: 2557 - RNA, 21 nt, synthetic construct
  misc_feature 1..21: note = Synthetic
  source 1..21: mol_type = other RNA
cctgataaacttcccacgaca

SEQ ID NO: 2558 - RNA, 21 nt, synthetic construct
  misc_feature 1..21: note = Synthetic
  source 1..21: mol_type = other RNA
cggatggatgtttgtgagaca

SEQ ID NO: 2559 - RNA, 21 nt, synthetic construct
  misc_feature 1..21: note = Synthetic
  source 1..21: mol_type = other RNA
gacacggaagagtactgcata

SEQ ID NO: 2560 - RNA, 21 nt, synthetic construct
  misc_feature 1..21: note = Synthetic
  source 1..21: mol_type = other RNA
gcagcagaacggatatgagaa

SEQ ID NO: 2561 - RNA, 21 nt, synthetic construct
  misc_feature 1..21: note = Synthetic
  source 1..21: mol_type = other RNA
gcagaacggatatgagaatca

SEQ ID NO: 2562 - RNA, 21 nt, synthetic construct
  misc_feature 1..21: note = Synthetic
  source 1..21: mol_type = other RNA
cagaacggatatgagaatcca

SEQ ID NO: 2563 - RNA, 21 nt, synthetic construct
  misc_feature 1..21: note = Synthetic
  source 1..21: mol_type = other RNA
accgtcgccaaagagacatga

SEQ ID NO: 2564 - RNA, 21 nt, synthetic construct
  misc_feature 1..21: note = Synthetic
  source 1..21: mol_type = other RNA
gttctgtggtaaactcaacaa

SEQ ID NO: 2565 - RNA, 21 nt, synthetic construct
  misc_feature 1..21: note = Synthetic
  source 1..21: mol_type = other RNA
ggtactttgatgtcactgaaa

SEQ ID NO: 2566 - RNA, 21 nt, synthetic construct
  misc_feature 1..21: note = Synthetic
  source 1..21: mol_type = other RNA
cccaaagtttactcaagacta

SEQ ID NO: 2567 - RNA, 21 nt, synthetic construct
  misc_feature 1..21: note = Synthetic
  source 1..21: mol_type = other RNA
ccaaagtttactcaagactaa

SEQ ID NO: 2568 - RNA, 21 nt, synthetic construct
  misc_feature 1..21: note = Synthetic
  source 1..21: mol_type = other RNA
catcatgtgttcaacatgcta

SEQ ID NO: 2569 - RNA, 21 nt, synthetic construct
  misc_feature 1..21: note = Synthetic
  source 1..21: mol_type = other RNA
aacatgctgaagaagtacgta

SEQ ID NO: 2570 - RNA, 21 nt, synthetic construct
  misc_feature 1..21: note = Synthetic
  source 1..21: mol_type = other RNA
ttctgtggtaaactcaacata

SEQ ID NO: 2571 - RNA, 21 nt, synthetic construct
  misc_feature 1..21: note = Synthetic
  source 1..21: mol_type = other RNA
tctgtggtaaactcaacatga

SEQ ID NO: 2572 - RNA, 23 nt, synthetic construct
  misc_feature 1..23: note = Synthetic
  source 1..23: mol_type = other RNA
ttgagtttaccacagaacatggc

SEQ ID NO: 2573 - RNA, 23 nt, synthetic construct
  misc_feature 1..23: note = Synthetic
  source 1..23: mol_type = other RNA
tgttgagtttaccacagaacatg

SEQ ID NO: 2574 - RNA, 23 nt, synthetic construct
  misc_feature 1..23: note = Synthetic
  source 1..23: mol_type = other RNA
tttgagtttaccacagaacatgg

SEQ ID NO: 2575 - RNA, 23 nt, synthetic construct
  misc_feature 1..23: note = Synthetic
  source 1..23: mol_type = other RNA
tgcatgttgagtttaccacagaa

SEQ ID NO: 2576 - RNA, 23 nt, synthetic construct
  misc_feature 1..23: note = Synthetic
  source 1..23: mol_type = other RNA
tatgtgcatgttgagtttaccac

SEQ ID NO: 2577 - RNA, 23 nt, synthetic construct
  misc_feature 1..23: note = Synthetic
  source 1..23: mol_type = other RNA
ttgcatgttgagtttaccacaga

SEQ ID NO: 2578 - RNA, 23 nt, synthetic construct
  misc_feature 1..23: note = Synthetic
  source 1..23: mol_type = other RNA
tcgtgcaagttagtgctcttctc

SEQ ID NO: 2579 - RNA, 23 nt, synthetic construct
  misc_feature 1..23: note = Synthetic
  source 1..23: mol_type = other RNA
ttgacatcaaagtaccagcggga

SEQ ID NO: 2580 - RNA, 23 nt, synthetic construct
  misc_feature 1..23: note = Synthetic
  source 1..23: mol_type = other RNA
tgagtttaccacagaacatggcg

SEQ ID NO: 2581 - RNA, 23 nt, synthetic construct
  misc_feature 1..23: note = Synthetic
  source 1..23: mol_type = other RNA
tgtgcatgttgagtttaccacag

SEQ ID NO: 2582 - RNA, 23 nt, synthetic construct
  misc_feature 1..23: note = Synthetic
  source 1..23: mol_type = other RNA
tacgtttgtgatctgcagttcag

SEQ ID NO: 2583 - RNA, 23 nt, synthetic construct
  misc_feature 1..23: note = Synthetic
  source 1..23: mol_type = other RNA
ttcgtgcaagttagtgctcttct

SEQ ID NO: 2584 - RNA, 23 nt, synthetic construct
  misc_feature 1..23: note = Synthetic
  source 1..23: mol_type = other RNA
ttagtcgtgcaagttagtgctct

SEQ ID NO: 2585 - RNA, 23 nt, synthetic construct
  misc_feature 1..23: note = Synthetic
  source 1..23: mol_type = other RNA
tatagtcgtgcaagttagtgctc

SEQ ID NO: 2586 - RNA, 23 nt, synthetic construct
  misc_feature 1..23: note = Synthetic
  source 1..23: mol_type = other RNA
tggtagtcttgagtaaactttgg

SEQ ID NO: 2587 - RNA, 23 nt, synthetic construct
  misc_feature 1..23: note = Synthetic
  source 1..23: mol_type = other RNA
tgacagagactggttcatgcgct

SEQ ID NO: 2588 - RNA, 23 nt, synthetic construct
  misc_feature 1..23: note = Synthetic
  source 1..23: mol_type = other RNA
tcggtaaggaatcacgatgtggg

SEQ ID NO: 2589 - RNA, 23 nt, synthetic construct
  misc_feature 1..23: note = Synthetic
  source 1..23: mol_type = other RNA
tcggacgtacttcttcagcatgt

SEQ ID NO: 2590 - RNA, 23 nt, synthetic construct
  misc_feature 1..23: note = Synthetic
  source 1..23: mol_type = other RNA
tagagactggttcatgcgctcgt

SEQ ID NO: 2591 - RNA, 23 nt, synthetic construct
  misc_feature 1..23: note = Synthetic
  source 1..23: mol_type = other RNA
ttcgtcggagtagttctgctcct

SEQ ID NO: 2592 - RNA, 23 nt, synthetic construct
  misc_feature 1..23: note = Synthetic
  source 1..23: mol_type = other RNA
taaggaatcacgatgtgggtgtg

SEQ ID NO: 2593 - RNA, 23 nt, synthetic construct
  misc_feature 1..23: note = Synthetic
  source 1..23: mol_type = other RNA
tgtcgtgcaagttagtgctcttc

SEQ ID NO: 2594 - RNA, 23 nt, synthetic construct
  misc_feature 1..23: note = Synthetic
  source 1..23: mol_type = other RNA
tcatagtcgtgcaagttagtgct

SEQ ID NO: 2595 - RNA, 23 nt, synthetic construct
  misc_feature 1..23: note = Synthetic
  source 1..23: mol_type = other RNA
tggttcactggtagtcttgagta

SEQ ID NO: 2596 - RNA, 23 nt, synthetic construct
  misc_feature 1..23: note = Synthetic
  source 1..23: mol_type = other RNA
taaaatgctttagggtgtgctgt

SEQ ID NO: 2597 - RNA, 23 nt, synthetic construct
  misc_feature 1..23: note = Synthetic
  source 1..23: mol_type = other RNA
ttcggagtagttctgctccttct

SEQ ID NO: 2598 - RNA, 23 nt, synthetic construct
  misc_feature 1..23: note = Synthetic
  source 1..23: mol_type = other RNA
tcgtcggagtagttctgctcctt

SEQ ID NO: 2599 - RNA, 23 nt, synthetic construct
  misc_feature 1..23: note = Synthetic
  source 1..23: mol_type = other RNA
tggatggatgtgtactgtttctt

SEQ ID NO: 2600 - RNA, 23 nt, synthetic construct
  misc_feature 1..23: note = Synthetic
  source 1..23: mol_type = other RNA
tgtttgtgatctgcagttcaggg

SEQ ID NO: 2601 - RNA, 23 nt, synthetic construct
  misc_feature 1..23: note = Synthetic
  source 1..23: mol_type = other RNA
tggtaaggaatcacgatgtgggt

SEQ ID NO: 2602 - RNA, 23 nt, synthetic construct
  misc_feature 1..23: note = Synthetic
  source 1..23: mol_type = other RNA
taacttgcacttgtcgggcacga

SEQ ID NO: 2603 - RNA, 23 nt, synthetic construct
  misc_feature 1..23: note = Synthetic
  source 1..23: mol_type = other RNA
tgaagaggttcactggtagtctt

SEQ ID NO: 2604 - RNA, 23 nt, synthetic construct
  misc_feature 1..23: note = Synthetic
  source 1..23: mol_type = other RNA
taccagtttttgatggcggactt

SEQ ID NO: 2605 - RNA, 23 nt, synthetic construct
  misc_feature 1..23: note = Synthetic
  source 1..23: mol_type = other RNA
ttgatgtaattctcgagggccag

SEQ ID NO: 2606 - RNA, 23 nt, synthetic construct
  misc_feature 1..23: note = Synthetic
  source 1..23: mol_type = other RNA
tggacgtacttcttcagcatgtt

SEQ ID NO: 2607 - RNA, 23 nt, synthetic construct
  misc_feature 1..23: note = Synthetic
  source 1..23: mol_type = other RNA
tacggacgtacttcttcagcatg

SEQ ID NO: 2608 - RNA, 23 nt, synthetic construct
  misc_feature 1..23: note = Synthetic
  source 1..23: mol_type = other RNA
tcaccagtttttgatggcggact

SEQ ID NO: 2609 - RNA, 23 nt, synthetic construct
  misc_feature 1..23: note = Synthetic
  source 1..23: mol_type = other RNA
tagcatgccatagtcgtgcaagt

SEQ ID NO: 2610 - RNA, 23 nt, synthetic construct
  misc_feature 1..23: note = Synthetic
  source 1..23: mol_type = other RNA
tcattctctcatgacctgggaca

SEQ ID NO: 2611 - RNA, 23 nt, synthetic construct
  misc_feature 1..23: note = Synthetic
  source 1..23: mol_type = other RNA
tgcacggacgtacttcttcagca

SEQ ID NO: 2612 - RNA, 23 nt, synthetic construct
  misc_feature 1..23: note = Synthetic
  source 1..23: mol_type = other RNA
tatgcgctcgtagatcacacgga

SEQ ID NO: 2613 - RNA, 23 nt, synthetic construct
  misc_feature 1..23: note = Synthetic
  source 1..23: mol_type = other RNA
tgggtagacctcttggcagtact

SEQ ID NO: 2614 - RNA, 23 nt, synthetic construct
  misc_feature 1..23: note = Synthetic
  source 1..23: mol_type = other RNA
ttgggacattctctctcggtgct

SEQ ID NO: 2615 - RNA, 23 nt, synthetic construct
  misc_feature 1..23: note = Synthetic
  source 1..23: mol_type = other RNA
tgaacacatgatgaggccttggg

SEQ ID NO: 2616 - RNA, 23 nt, synthetic construct
  misc_feature 1..23: note = Synthetic
  source 1..23: mol_type = other RNA
tcacggacgtacttcttcagcat

SEQ ID NO: 2617 - RNA, 23 nt, synthetic construct
  misc_feature 1..23: note = Synthetic
  source 1..23: mol_type = other RNA
tcgcacatgttcaaaatgcttta

SEQ ID NO: 2618 - RNA, 23 nt, synthetic construct
  misc_feature 1..23: note = Synthetic
  source 1..23: mol_type = other RNA
ttcgtagatcacacggaggtgtg

SEQ ID NO: 2619 - RNA, 23 nt, synthetic construct
  misc_feature 1..23: note = Synthetic
  source 1..23: mol_type = other RNA
tcggagtagttctgctccttctg

SEQ ID NO: 2620 - RNA, 23 nt, synthetic construct
  misc_feature 1..23: note = Synthetic
  source 1..23: mol_type = other RNA
ttggatgtgtactgtttcttctt

SEQ ID NO: 2621 - RNA, 23 nt, synthetic construct
  misc_feature 1..23: note = Synthetic
  source 1..23: mol_type = other RNA
tggtagacctcttggcagtactg

SEQ ID NO: 2622 - RNA, 23 nt, synthetic construct
  misc_feature 1..23: note = Synthetic
  source 1..23: mol_type = other RNA
tagggtagacctcttggcagtac

SEQ ID NO: 2623 - RNA, 23 nt, synthetic construct
  misc_feature 1..23: note = Synthetic
  source 1..23: mol_type = other RNA
tccatagtcgtgcaagttagtgc

SEQ ID NO: 2624 - RNA, 23 nt, synthetic construct
  misc_feature 1..23: note = Synthetic
  source 1..23: mol_type = other RNA
tccgccgtaaaagaatgggacac

SEQ ID NO: 2625 - RNA, 23 nt, synthetic construct
  misc_feature 1..23: note = Synthetic
  source 1..23: mol_type = other RNA
taacggccttcttgtcagctttg

SEQ ID NO: 2626 - RNA, 23 nt, synthetic construct
  misc_feature 1..23: note = Synthetic
  source 1..23: mol_type = other RNA
tggataacggccttcttgtcagc

SEQ ID NO: 2627 - RNA, 23 nt, synthetic construct
  misc_feature 1..23: note = Synthetic
  source 1..23: mol_type = other RNA
tgcgcacatgttcaaaatgcttt

SEQ ID NO: 2628 - RNA, 23 nt, synthetic construct
  misc_feature 1..23: note = Synthetic
  source 1..23: mol_type = other RNA
ttcatgcgctcgtagatcacacg

SEQ ID NO: 2629 - RNA, 23 nt, synthetic construct
  misc_feature 1..23: note = Synthetic
  source 1..23: mol_type = other RNA
tagttagtgctcttctcgctgca

SEQ ID NO: 2630 - RNA, 23 nt, synthetic construct
  misc_feature 1..23: note = Synthetic
  source 1..23: mol_type = other RNA
taaactttgggttgacacgctgc

SEQ ID NO: 2631 - RNA, 23 nt, synthetic construct
  misc_feature 1..23: note = Synthetic
  source 1..23: mol_type = other RNA
tgagtaaactttgggttgacacg

SEQ ID NO: 2632 - RNA, 23 nt, synthetic construct
  misc_feature 1..23: note = Synthetic
  source 1..23: mol_type = other RNA
tcgccgtaaaagaatgggacaca

SEQ ID NO: 2633 - RNA, 23 nt, synthetic construct
  misc_feature 1..23: note = Synthetic
  source 1..23: mol_type = other RNA
tagtaaactttgggttgacacgc

SEQ ID NO: 2634 - RNA, 23 nt, synthetic construct
  misc_feature 1..23: note = Synthetic
  source 1..23: mol_type = other RNA
tgggaagtttatcaggatcttgg

SEQ ID NO: 2635 - RNA, 23 nt, synthetic construct
  misc_feature 1..23: note = Synthetic
  source 1..23: mol_type = other RNA
ttgggaagtttatcaggatcttg

SEQ ID NO: 2636 - RNA, 23 nt, synthetic construct
  misc_feature 1..23: note = Synthetic
  source 1..23: mol_type = other RNA
taccaactaggcaacggtaagga

SEQ ID NO: 2637 - RNA, 23 nt, synthetic construct
  misc_feature 1..23: note = Synthetic
  source 1..23: mol_type = other RNA
tcgtaaaagaatgggacacactt

SEQ ID NO: 2638 - RNA, 23 nt, synthetic construct
  misc_feature 1..23: note = Synthetic
  source 1..23: mol_type = other RNA
tgccgtaaaagaatgggacacac

SEQ ID NO: 2639 - RNA, 23 nt, synthetic construct
  misc_feature 1..23: note = Synthetic
  source 1..23: mol_type = other RNA
ttgacaatcacggttgctatgac

SEQ ID NO: 2640 - RNA, 23 nt, synthetic construct
  misc_feature 1..23: note = Synthetic
  source 1..23: mol_type = other RNA
tttggattctcatatccgttctg

SEQ ID NO: 2641 - RNA, 23 nt, synthetic construct
  misc_feature 1..23: note = Synthetic
  source 1..23: mol_type = other RNA
tccgtaaaagaatgggacacact

SEQ ID NO: 2642 - RNA, 23 nt, synthetic construct
  misc_feature 1..23: note = Synthetic
  source 1..23: mol_type = other RNA
tgtgatgacaatcacggttgcta

SEQ ID NO: 2643 - RNA, 23 nt, synthetic construct
  misc_feature 1..23: note = Synthetic
  source 1..23: mol_type = other RNA
tgttagtgctcttctcgctgcat

SEQ ID NO: 2644 - RNA, 23 nt, synthetic construct
  misc_feature 1..23: note = Synthetic
  source 1..23: mol_type = other RNA
ttgaatcatgtccgaattctgca

SEQ ID NO: 2645 - RNA, 23 nt, synthetic construct
  misc_feature 1..23: note = Synthetic
  source 1..23: mol_type = other RNA
ttcgtgggaagtttatcaggatc

SEQ ID NO: 2646 - RNA, 23 nt, synthetic construct
  misc_feature 1..23: note = Synthetic
  source 1..23: mol_type = other RNA
ttggattctcatatccgttctgc

SEQ ID NO: 2647 - RNA, 23 nt, synthetic construct
  misc_feature 1..23: note = Synthetic
  source 1..23: mol_type = other RNA
tccaactaggcaacggtaaggaa

SEQ ID NO: 2648 - RNA, 23 nt, synthetic construct
  misc_feature 1..23: note = Synthetic
  source 1..23: mol_type = other RNA
tcgtgggaagtttatcaggatct

SEQ ID NO: 2649 - RNA, 23 nt, synthetic construct
  misc_feature 1..23: note = Synthetic
  source 1..23: mol_type = other RNA
tgtcgtgggaagtttatcaggat

SEQ ID NO: 2650 - RNA, 23 nt, synthetic construct
  misc_feature 1..23: note = Synthetic
  source 1..23: mol_type = other RNA
tgtctcacaaacatccatccgct

SEQ ID NO: 2651 - RNA, 23 nt, synthetic construct
  misc_feature 1..23: note = Synthetic
  source 1..23: mol_type = other RNA
tatgcagtactcttccgtgtcaa

SEQ ID NO: 2652 - RNA, 23 nt, synthetic construct
  misc_feature 1..23: note = Synthetic
  source 1..23: mol_type = other RNA
ttctcatatccgttctgctgcat

SEQ ID NO: 2653 - RNA, 23 nt, synthetic construct
  misc_feature 1..23: note = Synthetic
  source 1..23: mol_type = other RNA
tgattctcatatccgttctgctg

SEQ ID NO: 2654 - RNA, 23 nt, synthetic construct
  misc_feature 1..23: note = Synthetic
  source 1..23: mol_type = other RNA
tggattctcatatccgttctgct

SEQ ID NO: 2655 - RNA, 23 nt, synthetic construct
  misc_feature 1..23: note = Synthetic
  source 1..23: mol_type = other RNA
tcatgtctctttggcgacggtgt

SEQ ID NO: 2656 - RNA, 23 nt, synthetic construct
  misc_feature 1..23: note = Synthetic
  source 1..23: mol_type = other RNA
ttgttgagtttaccacagaacat

SEQ ID NO: 2657 - RNA, 23 nt, synthetic construct
  misc_feature 1..23: note = Synthetic
  source 1..23: mol_type = other RNA
tttcagtgacatcaaagtaccag

SEQ ID NO: 2658 - RNA, 23 nt, synthetic construct
  misc_feature 1..23: note = Synthetic
  source 1..23: mol_type = other RNA
tagtcttgagtaaactttgggtt

SEQ ID NO: 2659 - RNA, 23 nt, synthetic construct
  misc_feature 1..23: note = Synthetic
  source 1..23: mol_type = other RNA
ttagtcttgagtaaactttgggt

SEQ ID NO: 2660 - RNA, 23 nt, synthetic construct
  misc_feature 1..23: note = Synthetic
  source 1..23: mol_type = other RNA
tagcatgttgaacacatgatgag

SEQ ID NO: 2661 - RNA, 23 nt, synthetic construct
  misc_feature 1..23: note = Synthetic
  source 1..23: mol_type = other RNA
tacgtacttcttcagcatgttga

SEQ ID NO: 2662 - RNA, 23 nt, synthetic construct
  misc_feature 1..23: note = Synthetic
  source 1..23: mol_type = other RNA
tatgttgagtttaccacagaaca

SEQ ID NO: 2663 - RNA, 23 nt, synthetic construct
  misc_feature 1..23: note = Synthetic
  source 1..23: mol_type = other RNA
tcatgttgagtttaccacagaac

SEQ ID NO: 2664 - RNA, 23 nt, synthetic construct
  misc_feature 1..23: note = Synthetic
  source 1..23: mol_type = other RNA
gccatgttctgtggtaaactcaa

SEQ ID NO: 2665 - RNA, 23 nt, synthetic construct
  misc_feature 1..23: note = Synthetic
  source 1..23: mol_type = other RNA
catgttctgtggtaaactcaaca

SEQ ID NO: 2666 - RNA, 23 nt, synthetic construct
  misc_feature 1..23: note = Synthetic
  source 1..23: mol_type = other RNA
ccatgttctgtggtaaactcaac

SEQ ID NO: 2667 - RNA, 23 nt, synthetic construct
  misc_feature 1..23: note = Synthetic
  source 1..23: mol_type = other RNA
ttctgtggtaaactcaacatgca

SEQ ID NO: 2668 - RNA, 23 nt, synthetic construct
  misc_feature 1..23: note = Synthetic
  source 1..23: mol_type = other RNA
gtggtaaactcaacatgcacatg

SEQ ID NO: 2669 - RNA, 23 nt, synthetic construct
  misc_feature 1..23: note = Synthetic
  source 1..23: mol_type = other RNA
tctgtggtaaactcaacatgcac

SEQ ID NO: 2670 - RNA, 23 nt, synthetic construct
  misc_feature 1..23: note = Synthetic
  source 1..23: mol_type = other RNA
gagaagagcactaacttgcacga

SEQ ID NO: 2671 - RNA, 23 nt, synthetic construct
  misc_feature 1..23: note = Synthetic
  source 1..23: mol_type = other RNA
tcccgctggtactttgatgtcac

SEQ ID NO: 2672 - RNA, 23 nt, synthetic construct
  misc_feature 1..23: note = Synthetic
  source 1..23: mol_type = other RNA
cgccatgttctgtggtaaactca

SEQ ID NO: 2673 - RNA, 23 nt, synthetic construct
  misc_feature 1..23: note = Synthetic
  source 1..23: mol_type = other RNA
ctgtggtaaactcaacatgcaca

SEQ ID NO: 2674 - RNA, 23 nt, synthetic construct
  misc_feature 1..23: note = Synthetic
  source 1..23: mol_type = other RNA
ctgaactgcagatcacaaacgtg

SEQ ID NO: 2675 - RNA, 23 nt, synthetic construct
  misc_feature 1..23: note = Synthetic
  source 1..23: mol_type = other RNA
agaagagcactaacttgcacgac

SEQ ID NO: 2676 - RNA, 23 nt, synthetic construct
  misc_feature 1..23: note = Synthetic
  source 1..23: mol_type = other RNA
agagcactaacttgcacgactat

SEQ ID NO: 2677 - RNA, 23 nt, synthetic construct
  misc_feature 1..23: note = Synthetic
  source 1..23: mol_type = other RNA
gagcactaacttgcacgactatg

SEQ ID NO: 2678 - RNA, 23 nt, synthetic construct
  misc_feature 1..23: note = Synthetic
  source 1..23: mol_type = other RNA
ccaaagtttactcaagactacca

SEQ ID NO: 2679 - RNA, 23 nt, synthetic construct
  misc_feature 1..23: note = Synthetic
  source 1..23: mol_type = other RNA
agcgcatgaaccagtctctgtcc

SEQ ID NO: 2680 - RNA, 23 nt, synthetic construct
  misc_feature 1..23: note = Synthetic
  source 1..23: mol_type = other RNA
cccacatcgtgattccttaccgt

SEQ ID NO: 2681 - RNA, 23 nt, synthetic construct
  misc_feature 1..23: note = Synthetic
  source 1..23: mol_type = other RNA
acatgctgaagaagtacgtccgt

SEQ ID NO: 2682 - RNA, 23 nt, synthetic construct
  misc_feature 1..23: note = Synthetic
  source 1..23: mol_type = other RNA
acgagcgcatgaaccagtctctg

SEQ ID NO: 2683 - RNA, 23 nt, synthetic construct
  misc_feature 1..23: note = Synthetic
  source 1..23: mol_type = other RNA
aggagcagaactactccgacgat

SEQ ID NO: 2684 - RNA, 23 nt, synthetic construct
  misc_feature 1..23: note = Synthetic
  source 1..23: mol_type = other RNA
cacacccacatcgtgattcctta

SEQ ID NO: 2685 - RNA, 23 nt, synthetic construct
  misc_feature 1..23: note = Synthetic
  source 1..23: mol_type = other RNA
gaagagcactaacttgcacgact

SEQ ID NO: 2686 - RNA, 23 nt, synthetic construct
  misc_feature 1..23: note = Synthetic
  source 1..23: mol_type = other RNA
agcactaacttgcacgactatgg

SEQ ID NO: 2687 - RNA, 23 nt, synthetic construct
  misc_feature 1..23: note = Synthetic
  source 1..23: mol_type = other RNA
tactcaagactaccagtgaacct

SEQ ID NO: 2688 - RNA, 23 nt, synthetic construct
  misc_feature 1..23: note = Synthetic
  source 1..23: mol_type = other RNA
acagcacaccctaaagcattttg

SEQ ID NO: 2689 - RNA, 23 nt, synthetic construct
  misc_feature 1..23: note = Synthetic
  source 1..23: mol_type = other RNA
agaaggagcagaactactccgac

SEQ ID NO: 2690 - RNA, 23 nt, synthetic construct
  misc_feature 1..23: note = Synthetic
  source 1..23: mol_type = other RNA
aaggagcagaactactccgacga

SEQ ID NO: 2691 - RNA, 23 nt, synthetic construct
  misc_feature 1..23: note = Synthetic
  source 1..23: mol_type = other RNA
aagaaacagtacacatccatcca

SEQ ID NO: 2692 - RNA, 23 nt, synthetic construct
  misc_feature 1..23: note = Synthetic
  source 1..23: mol_type = other RNA
ccctgaactgcagatcacaaacg

SEQ ID NO: 2693 - RNA, 23 nt, synthetic construct
  misc_feature 1..23: note = Synthetic
  source 1..23: mol_type = other RNA
acccacatcgtgattccttaccg

SEQ ID NO: 2694 - RNA, 23 nt, synthetic construct
  misc_feature 1..23: note = Synthetic
  source 1..23: mol_type = other RNA
tcgtgcccgacaagtgcaagttc

SEQ ID NO: 2695 - RNA, 23 nt, synthetic construct
  misc_feature 1..23: note = Synthetic
  source 1..23: mol_type = other RNA
aagactaccagtgaacctcttcc

SEQ ID NO: 2696 - RNA, 23 nt, synthetic construct
  misc_feature 1..23: note = Synthetic
  source 1..23: mol_type = other RNA
aagtccgccatcaaaaactggtg

SEQ ID NO: 2697 - RNA, 23 nt, synthetic construct
  misc_feature 1..23: note = Synthetic
  source 1..23: mol_type = other RNA
ctggccctcgagaattacatcac

SEQ ID NO: 2698 - RNA, 23 nt, synthetic construct
  misc_feature 1..23: note = Synthetic
  source 1..23: mol_type = other RNA
aacatgctgaagaagtacgtccg

SEQ ID NO: 2699 - RNA, 23 nt, synthetic construct
  misc_feature 1..23: note = Synthetic
  source 1..23: mol_type = other RNA
catgctgaagaagtacgtccgtg

SEQ ID NO: 2700 - RNA, 23 nt, synthetic construct
  misc_feature 1..23: note = Synthetic
  source 1..23: mol_type = other RNA
agtccgccatcaaaaactggtgt

SEQ ID NO: 2701 - RNA, 23 nt, synthetic construct
  misc_feature 1..23: note = Synthetic
  source 1..23: mol_type = other RNA
acttgcacgactatggcatgctg

SEQ ID NO: 2702 - RNA, 23 nt, synthetic construct
  misc_feature 1..23: note = Synthetic
  source 1..23: mol_type = other RNA
tgtcccaggtcatgagagaatgg

SEQ ID NO: 2703 - RNA, 23 nt, synthetic construct
  misc_feature 1..23: note = Synthetic
  source 1..23: mol_type = other RNA
tgctgaagaagtacgtccgtgcg

SEQ ID NO: 2704 - RNA, 23 nt, synthetic construct
  misc_feature 1..23: note = Synthetic
  source 1..23: mol_type = other RNA
tccgtgtgatctacgagcgcatg

SEQ ID NO: 2705 - RNA, 23 nt, synthetic construct
  misc_feature 1..23: note = Synthetic
  source 1..23: mol_type = other RNA
agtactgccaagaggtctaccct

SEQ ID NO: 2706 - RNA, 23 nt, synthetic construct
  misc_feature 1..23: note = Synthetic
  source 1..23: mol_type = other RNA
agcaccgagagagaatgtcccag

SEQ ID NO: 2707 - RNA, 23 nt, synthetic construct
  misc_feature 1..23: note = Synthetic
  source 1..23: mol_type = other RNA
cccaaggcctcatcatgtgttca

SEQ ID NO: 2708 - RNA, 23 nt, synthetic construct
  misc_feature 1..23: note = Synthetic
  source 1..23: mol_type = other RNA
atgctgaagaagtacgtccgtgc

SEQ ID NO: 2709 - RNA, 23 nt, synthetic construct
  misc_feature 1..23: note = Synthetic
  source 1..23: mol_type = other RNA
taaagcattttgaacatgtgcgc

SEQ ID NO: 2710 - RNA, 23 nt, synthetic construct
  misc_feature 1..23: note = Synthetic
  source 1..23: mol_type = other RNA
cacacctccgtgtgatctacgag

SEQ ID NO: 2711 - RNA, 23 nt, synthetic construct
  misc_feature 1..23: note = Synthetic
  source 1..23: mol_type = other RNA
cagaaggagcagaactactccga

SEQ ID NO: 2712 - RNA, 23 nt, synthetic construct
  misc_feature 1..23: note = Synthetic
  source 1..23: mol_type = other RNA
aagaagaaacagtacacatccat

SEQ ID NO: 2713 - RNA, 23 nt, synthetic construct
  misc_feature 1..23: note = Synthetic
  source 1..23: mol_type = other RNA
cagtactgccaagaggtctaccc

SEQ ID NO: 2714 - RNA, 23 nt, synthetic construct
  misc_feature 1..23: note = Synthetic
  source 1..23: mol_type = other RNA
gtactgccaagaggtctaccctg

SEQ ID NO: 2715 - RNA, 23 nt, synthetic construct
  misc_feature 1..23: note = Synthetic
  source 1..23: mol_type = other RNA
gcactaacttgcacgactatggc

SEQ ID NO: 2716 - RNA, 23 nt, synthetic construct
  misc_feature 1..23: note = Synthetic
  source 1..23: mol_type = other RNA
gtgtcccattcttttacggcgga

SEQ ID NO: 2717 - RNA, 23 nt, synthetic construct
  misc_feature 1..23: note = Synthetic
  source 1..23: mol_type = other RNA
caaagctgacaagaaggccgtta

SEQ ID NO: 2718 - RNA, 23 nt, synthetic construct
  misc_feature 1..23: note = Synthetic
  source 1..23: mol_type = other RNA
gctgacaagaaggccgttatcca

SEQ ID NO: 2719 - RNA, 23 nt, synthetic construct
  misc_feature 1..23: note = Synthetic
  source 1..23: mol_type = other RNA
aaagcattttgaacatgtgcgca

SEQ ID NO: 2720 - RNA, 23 nt, synthetic construct
  misc_feature 1..23: note = Synthetic
  source 1..23: mol_type = other RNA
cgtgtgatctacgagcgcatgaa

SEQ ID NO: 2721 - RNA, 23 nt, synthetic construct
  misc_feature 1..23: note = Synthetic
  source 1..23: mol_type = other RNA
tgcagcgagaagagcactaactt

SEQ ID NO: 2722 - RNA, 23 nt, synthetic construct
  misc_feature 1..23: note = Synthetic
  source 1..23: mol_type = other RNA
gcagcgtgtcaacccaaagttta

SEQ ID NO: 2723 - RNA, 23 nt, synthetic construct
  misc_feature 1..23: note = Synthetic
  source 1..23: mol_type = other RNA
cgtgtcaacccaaagtttactca

SEQ ID NO: 2724 - RNA, 23 nt, synthetic construct
  misc_feature 1..23: note = Synthetic
  source 1..23: mol_type = other RNA
tgtgtcccattcttttacggcgg

SEQ ID NO: 2725 - RNA, 23 nt, synthetic construct
  misc_feature 1..23: note = Synthetic
  source 1..23: mol_type = other RNA
gcgtgtcaacccaaagtttactc

SEQ ID NO: 2726 - RNA, 23 nt, synthetic construct
  misc_feature 1..23: note = Synthetic
  source 1..23: mol_type = other RNA
ccaagatcctgataaacttccca

SEQ ID NO: 2727 - RNA, 23 nt, synthetic construct
  misc_feature 1..23: note = Synthetic
  source 1..23: mol_type = other RNA
caagatcctgataaacttcccac

SEQ ID NO: 2728 - RNA, 23 nt, synthetic construct
  misc_feature 1..23: note = Synthetic
  source 1..23: mol_type = other RNA
tccttaccgttgcctagttggtg

SEQ ID NO: 2729 - RNA, 23 nt, synthetic construct
  misc_feature 1..23: note = Synthetic
  source 1..23: mol_type = other RNA
aagtgtgtcccattcttttacgg

SEQ ID NO: 2730 - RNA, 23 nt, synthetic construct
  misc_feature 1..23: note = Synthetic
  source 1..23: mol_type = other RNA
gtgtgtcccattcttttacggcg

SEQ ID NO: 2731 - RNA, 23 nt, synthetic construct
  misc_feature 1..23: note = Synthetic
  source 1..23: mol_type = other RNA
gtcatagcaaccgtgattgtcat

SEQ ID NO: 2732 - RNA, 23 nt, synthetic construct
  misc_feature 1..23: note = Synthetic
  source 1..23: mol_type = other RNA
cagaacggatatgagaatccaac

SEQ ID NO: 2733 - RNA, 23 nt, synthetic construct
  misc_feature 1..23: note = Synthetic
  source 1..23: mol_type = other RNA
agtgtgtcccattcttttacggc

SEQ ID NO: 2734 - RNA, 23 nt, synthetic construct
  misc_feature 1..23: note = Synthetic
  source 1..23: mol_type = other RNA
tagcaaccgtgattgtcatcacc

SEQ ID NO: 2735 - RNA, 23 nt, synthetic construct
  misc_feature 1..23: note = Synthetic
  source 1..23: mol_type = other RNA
atgcagcgagaagagcactaact

SEQ ID NO: 2736 - RNA, 23 nt, synthetic construct
  misc_feature 1..23: note = Synthetic
  source 1..23: mol_type = other RNA
tgcagaattcggacatgattcag

SEQ ID NO: 2737 - RNA, 23 nt, synthetic construct
  misc_feature 1..23: note = Synthetic
  source 1..23: mol_type = other RNA
gatcctgataaacttcccacgac

SEQ ID NO: 2738 - RNA, 23 nt, synthetic construct
  misc_feature 1..23: note = Synthetic
  source 1..23: mol_type = other RNA
gcagaacggatatgagaatccaa

SEQ ID NO: 2739 - RNA, 23 nt, synthetic construct
  misc_feature 1..23: note = Synthetic
  source 1..23: mol_type = other RNA
ttccttaccgttgcctagttggt

SEQ ID NO: 2740 - RNA, 23 nt, synthetic construct
  misc_feature 1..23: note = Synthetic
  source 1..23: mol_type = other RNA
agatcctgataaacttcccacga

SEQ ID NO: 2741 - RNA, 23 nt, synthetic construct
  misc_feature 1..23: note = Synthetic
  source 1..23: mol_type = other RNA
atcctgataaacttcccacgaca

SEQ ID NO: 2742 - RNA, 23 nt, synthetic construct
  misc_feature 1..23: note = Synthetic
  source 1..23: mol_type = other RNA
agcggatggatgtttgtgagacc

SEQ ID NO: 2743 - RNA, 23 nt, synthetic construct
  misc_feature 1..23: note = Synthetic
  source 1..23: mol_type = other RNA
ttgacacggaagagtactgcatg

SEQ ID NO: 2744 - RNA, 23 nt, synthetic construct
  misc_feature 1..23: note = Synthetic
  source 1..23: mol_type = other RNA
atgcagcagaacggatatgagaa

SEQ ID NO: 2745 - RNA, 23 nt, synthetic construct
  misc_feature 1..23: note = Synthetic
  source 1..23: mol_type = other RNA
cagcagaacggatatgagaatcc

SEQ ID NO: 2746 - RNA, 23 nt, synthetic construct
  misc_feature 1..23: note = Synthetic
  source 1..23: mol_type = other RNA
agcagaacggatatgagaatcca

SEQ ID NO: 2747 - RNA, 23 nt, synthetic construct
  misc_feature 1..23: note = Synthetic
  source 1..23: mol_type = other RNA
acaccgtcgccaaagagacatgc

SEQ ID NO: 2748 - RNA, 23 nt, synthetic construct
  misc_feature 1..23: note = Synthetic
  source 1..23: mol_type = other RNA
atgttctgtggtaaactcaacat

SEQ ID NO: 2749 - RNA, 23 nt, synthetic construct
  misc_feature 1..23: note = Synthetic
  source 1..23: mol_type = other RNA
ctggtactttgatgtcactgaag

SEQ ID NO: 2750 - RNA, 23 nt, synthetic construct
  misc_feature 1..23: note = Synthetic
  source 1..23: mol_type = other RNA
aacccaaagtttactcaagacta

SEQ ID NO: 2751 - RNA, 23 nt, synthetic construct
  misc_feature 1..23: note = Synthetic
  source 1..23: mol_type = other RNA
acccaaagtttactcaagactac

SEQ ID NO: 2752 - RNA, 23 nt, synthetic construct
  misc_feature 1..23: note = Synthetic
  source 1..23: mol_type = other RNA
ctcatcatgtgttcaacatgctg

SEQ ID NO: 2753 - RNA, 23 nt, synthetic construct
  misc_feature 1..23: note = Synthetic
  source 1..23: mol_type = other RNA
tcaacatgctgaagaagtacgtc

SEQ ID NO: 2754 - RNA, 23 nt, synthetic construct
  misc_feature 1..23: note = Synthetic
  source 1..23: mol_type = other RNA
tgttctgtggtaaactcaacatg

SEQ ID NO: 2755 - RNA, 23 nt, synthetic construct
  misc_feature 1..23: note = Synthetic
  source 1..23: mol_type = other RNA
gttctgtggtaaactcaacatgc

SEQ ID NO: 2756 - RNA, 21 nt, synthetic construct
  misc_feature 1..21: note = Synthetic
  source 1..21: mol_type = other RNA
ccatgttctgtggtaaactca

SEQ ID NO: 2757 - RNA, 21 nt, synthetic construct
  misc_feature 1..21: note = Synthetic
  source 1..21: mol_type = other RNA
catgttctgtggtaaactcaa

SEQ ID NO: 2758 - RNA, 21 nt, synthetic construct
  misc_feature 1..21: note = Synthetic
  source 1..21: mol_type = other RNA
atgttctgtggtaaactcaaa

SEQ ID NO: 2759 - RNA, 21 nt, synthetic construct
  misc_feature 1..21: note = Synthetic
  source 1..21: mol_type = other RNA
tgttctgtggtaaactcaaca

SEQ ID NO: 2760 - RNA, 21 nt, synthetic construct
  misc_feature 1..21: note = Synthetic
  source 1..21: mol_type = other RNA
gttctgtggtaaactcaacaa

SEQ ID NO: 2761 - RNA, 21 nt, synthetic construct
  misc_feature 1..21: note = Synthetic
  source 1..21: mol_type = other RNA
ttctgtggtaaactcaacata

SEQ ID NO: 2762 - RNA, 21 nt, synthetic construct
  misc_feature 1..21: note = Synthetic
  source 1..21: mol_type = other RNA
tctgtggtaaactcaacatga

SEQ ID NO: 2763 - RNA, 21 nt, synthetic construct
  misc_feature 1..21: note = Synthetic
  source 1..21: mol_type = other RNA
ctgtggtaaactcaacatgca

SEQ ID NO: 2764 - RNA, 21 nt, synthetic construct
  misc_feature 1..21: note = Synthetic
  source 1..21: mol_type = other RNA
tgtggtaaactcaacatgcaa

SEQ ID NO: 2765 - RNA, 21 nt, synthetic construct
  misc_feature 1..21: note = Synthetic
  source 1..21: mol_type = other RNA
gtggtaaactcaacatgcaca

SEQ ID NO: 2766 - RNA, 21 nt, synthetic construct
  misc_feature 1..21: note = Synthetic
  source 1..21: mol_type = other RNA
ggtaaactcaacatgcacata

SEQ ID NO: 2767 - RNA, 21 nt, synthetic construct
  misc_feature 1..21: note = Synthetic
  source 1..21: mol_type = other RNA
gtactgccaagaggtctacca

SEQ ID NO: 2768 - RNA, 21 nt, synthetic construct
  misc_feature 1..21: note = Synthetic
  source 1..21: mol_type = other RNA
tactgccaagaggtctaccca

SEQ ID NO: 2769 - RNA, 21 nt, synthetic construct
  misc_feature 1..21: note = Synthetic
  source 1..21: mol_type = other RNA
actgccaagaggtctacccta

SEQ ID NO: 2770 - RNA, 21 nt, synthetic construct
  misc_feature 1..21: note = Synthetic
  source 1..21: mol_type = other RNA
ctgaactgcagatcacaaaca

SEQ ID NO: 2771 - RNA, 21 nt, synthetic construct
  misc_feature 1..21: note = Synthetic
  source 1..21: mol_type = other RNA
gaactgcagatcacaaacgta

SEQ ID NO: 2772 - RNA, 21 nt, synthetic construct
  misc_feature 1..21: note = Synthetic
  source 1..21: mol_type = other RNA
cacccacatcgtgattcctta

SEQ ID NO: 2773 - RNA, 21 nt, synthetic construct
  misc_feature 1..21: note = Synthetic
  source 1..21: mol_type = other RNA
ccacatcgtgattccttacca

SEQ ID NO: 2774 - RNA, 21 nt, synthetic construct
  misc_feature 1..21: note = Synthetic
  source 1..21: mol_type = other RNA
cacatcgtgattccttaccga

SEQ ID NO: 2775 - RNA, 21 nt, synthetic construct
  misc_feature 1..21: note = Synthetic
  source 1..21: mol_type = other RNA
ccttaccgttgcctagttgga

SEQ ID NO: 2776 - RNA, 21 nt, synthetic construct
  misc_feature 1..21: note = Synthetic
  source 1..21: mol_type = other RNA
cttaccgttgcctagttggta

SEQ ID NO: 2777 - RNA, 21 nt, synthetic construct
  misc_feature 1..21: note = Synthetic
  source 1..21: mol_type = other RNA
gtgcccgacaagtgcaagtta

SEQ ID NO: 2778 - RNA, 21 nt, synthetic construct
  misc_feature 1..21: note = Synthetic
  source 1..21: mol_type = other RNA
cggatggatgtttgtgagaca

SEQ ID NO: 2779 - RNA, 21 nt, synthetic construct
  misc_feature 1..21: note = Synthetic
  source 1..21: mol_type = other RNA
accgtcgccaaagagacatga

SEQ ID NO: 2780 - RNA, 21 nt, synthetic construct
  misc_feature 1..21: note = Synthetic
  source 1..21: mol_type = other RNA
gcagcgagaagagcactaaca

SEQ ID NO: 2781 - RNA, 21 nt, synthetic construct
  misc_feature 1..21: note = Synthetic
  source 1..21: mol_type = other RNA
cagcgagaagagcactaacta

SEQ ID NO: 2782 - RNA, 21 nt, synthetic construct
  misc_feature 1..21: note = Synthetic
  source 1..21: mol_type = other RNA
gaagagcactaacttgcacga

SEQ ID NO: 2783 - RNA, 21 nt, synthetic construct
  misc_feature 1..21: note = Synthetic
  source 1..21: mol_type = other RNA
aagagcactaacttgcacgaa

SEQ ID NO: 2784 - RNA, 21 nt, synthetic construct
  misc_feature 1..21: note = Synthetic
  source 1..21: mol_type = other RNA
agagcactaacttgcacgaca

SEQ ID NO: 2785 - RNA, 21 nt, synthetic construct
  misc_feature 1..21: note = Synthetic
  source 1..21: mol_type = other RNA
agcactaacttgcacgactaa

SEQ ID NO: 2786 - RNA, 21 nt, synthetic construct
  misc_feature 1..21: note = Synthetic
  source 1..21: mol_type = other RNA
gcactaacttgcacgactata

SEQ ID NO: 2787 - RNA, 21 nt, synthetic construct
  misc_feature 1..21: note = Synthetic
  source 1..21: mol_type = other RNA
cactaacttgcacgactatga

SEQ ID NO: 2788 - RNA, 21 nt, synthetic construct
  misc_feature 1..21: note = Synthetic
  source 1..21: mol_type = other RNA
actaacttgcacgactatgga

SEQ ID NO: 2789 - RNA, 21 nt, synthetic construct
  misc_feature 1..21: note = Synthetic
  source 1..21: mol_type = other RNA
ttgcacgactatggcatgcta

SEQ ID NO: 2790 - RNA, 21 nt, synthetic construct
  misc_feature 1..21: note = Synthetic
  source 1..21: mol_type = other RNA
ccgctggtactttgatgtcaa

SEQ ID NO: 2791 - RNA, 21 nt, synthetic construct
  misc_feature 1..21: note = Synthetic
  source 1..21: mol_type = other RNA
ggtactttgatgtcactgaaa

SEQ ID NO: 2792 - RNA, 21 nt, synthetic construct
  misc_feature 1..21: note = Synthetic
  source 1..21: mol_type = other RNA
gtgtgtcccattcttttacga

SEQ ID NO: 2793 - RNA, 21 nt, synthetic construct
  misc_feature 1..21: note = Synthetic
  source 1..21: mol_type = other RNA
tgtgtcccattcttttacgga

SEQ ID NO: 2794 - RNA, 21 nt, synthetic construct
  misc_feature 1..21: note = Synthetic
  source 1..21: mol_type = other RNA
gtgtcccattcttttacggca

SEQ ID NO: 2795 - RNA, 21 nt, synthetic construct
  misc_feature 1..21: note = Synthetic
  source 1..21: mol_type = other RNA
tgtcccattcttttacggcga

SEQ ID NO: 2796 - RNA, 21 nt, synthetic construct
  misc_feature 1..21: note = Synthetic
  source 1..21: mol_type = other RNA
gtcccattcttttacggcgga

SEQ ID NO: 2797 - RNA, 21 nt, synthetic construct
  misc_feature 1..21: note = Synthetic
  source 1..21: mol_type = other RNA
gacacggaagagtactgcata

SEQ ID NO: 2798 - RNA, 21 nt, synthetic construct
  misc_feature 1..21: note = Synthetic
  source 1..21: mol_type = other RNA
agcgtgtcaacccaaagttta

SEQ ID NO: 2799 - RNA, 21 nt, synthetic construct
  misc_feature 1..21: note = Synthetic
  source 1..21: mol_type = other RNA
gtgtcaacccaaagtttacta

SEQ ID NO: 2800 - RNA, 21 nt, synthetic construct
  misc_feature 1..21: note = Synthetic
  source 1..21: mol_type = other RNA
tgtcaacccaaagtttactca

SEQ ID NO: 2801 - RNA, 21 nt, synthetic construct
  misc_feature 1..21: note = Synthetic
  source 1..21: mol_type = other RNA
cccaaagtttactcaagacta

SEQ ID NO: 2802 - RNA, 21 nt, synthetic construct
  misc_feature 1..21: note = Synthetic
  source 1..21: mol_type = other RNA
ccaaagtttactcaagactaa

SEQ ID NO: 2803 - RNA, 21 nt, synthetic construct
  misc_feature 1..21: note = Synthetic
  source 1..21: mol_type = other RNA
aaagtttactcaagactacca

SEQ ID NO: 2804 - RNA, 21 nt, synthetic construct
  misc_feature 1..21: note = Synthetic
  source 1..21: mol_type = other RNA
ctcaagactaccagtgaacca

SEQ ID NO: 2805 - RNA, 21 nt, synthetic construct
  misc_feature 1..21: note = Synthetic
  source 1..21: mol_type = other RNA
gactaccagtgaacctcttca

SEQ ID NO: 2806 - RNA, 21 nt, synthetic construct
  misc_feature 1..21: note = Synthetic
  source 1..21: mol_type = other RNA
aagatcctgataaacttccca

SEQ ID NO: 2807 - RNA, 21 nt, synthetic construct
  misc_feature 1..21: note = Synthetic
  source 1..21: mol_type = other RNA
agatcctgataaacttcccaa

SEQ ID NO: 2808 - RNA, 21 nt, synthetic construct
  misc_feature 1..21: note = Synthetic
  source 1..21: mol_type = other RNA
atcctgataaacttcccacga

SEQ ID NO: 2809 - RNA, 21 nt, synthetic construct
  misc_feature 1..21: note = Synthetic
  source 1..21: mol_type = other RNA
tcctgataaacttcccacgaa

SEQ ID NO: 2810 - RNA, 21 nt, synthetic construct
  misc_feature 1..21: note = Synthetic
  source 1..21: mol_type = other RNA
cctgataaacttcccacgaca

SEQ ID NO: 2811 - RNA, 21 nt, synthetic construct
  misc_feature 1..21: note = Synthetic
  source 1..21: mol_type = other RNA
caccgagagagaatgtcccaa

SEQ ID NO: 2812 - RNA, 21 nt, synthetic construct
  misc_feature 1..21: note = Synthetic
  source 1..21: mol_type = other RNA
tcccaggtcatgagagaatga

SEQ ID NO: 2813 - RNA, 21 nt, synthetic construct
  misc_feature 1..21: note = Synthetic
  source 1..21: mol_type = other RNA
aagctgacaagaaggccgtta

SEQ ID NO: 2814 - RNA, 21 nt, synthetic construct
  misc_feature 1..21: note = Synthetic
  source 1..21: mol_type = other RNA
tgacaagaaggccgttatcca

SEQ ID NO: 2815 - RNA, 21 nt, synthetic construct
  misc_feature 1..21: note = Synthetic
  source 1..21: mol_type = other RNA
ggccctcgagaattacatcaa

SEQ ID NO: 2816 - RNA, 21 nt, synthetic construct
  misc_feature 1..21: note = Synthetic
  source 1..21: mol_type = other RNA
caaggcctcatcatgtgttca

SEQ ID NO: 2817 - RNA, 21 nt, synthetic construct
  misc_feature 1..21: note = Synthetic
  source 1..21: mol_type = other RNA
catcatgtgttcaacatgcta

SEQ ID NO: 2818 - RNA, 21 nt, synthetic construct
  misc_feature 1..21: note = Synthetic
  source 1..21: mol_type = other RNA
aacatgctgaagaagtacgta

SEQ ID NO: 2819 - RNA, 21 nt, synthetic construct
  misc_feature 1..21: note = Synthetic
  source 1..21: mol_type = other RNA
catgctgaagaagtacgtcca

SEQ ID NO: 2820 - RNA, 21 nt, synthetic construct
  misc_feature 1..21: note = Synthetic
  source 1..21: mol_type = other RNA
atgctgaagaagtacgtccga

SEQ ID NO: 2821 - RNA, 21 nt, synthetic construct
  misc_feature 1..21: note = Synthetic
  source 1..21: mol_type = other RNA
tgctgaagaagtacgtccgta

SEQ ID NO: 2822 - RNA, 21 nt, synthetic construct
  misc_feature 1..21: note = Synthetic
  source 1..21: mol_type = other RNA
gctgaagaagtacgtccgtga

SEQ ID NO: 2823 - RNA, 21 nt, synthetic construct
  misc_feature 1..21: note = Synthetic
  source 1..21: mol_type = other RNA
ctgaagaagtacgtccgtgca

SEQ ID NO: 2824 - RNA, 21 nt, synthetic construct
  misc_feature 1..21: note = Synthetic
  source 1..21: mol_type = other RNA
agcacaccctaaagcatttta

SEQ ID NO: 2825 - RNA, 21 nt, synthetic construct
  misc_feature 1..21: note = Synthetic
  source 1..21: mol_type = other RNA
aagcattttgaacatgtgcga

SEQ ID NO: 2826 - RNA, 21 nt, synthetic construct
  misc_feature 1..21: note = Synthetic
  source 1..21: mol_type = other RNA
agcattttgaacatgtgcgca

SEQ ID NO: 2827 - RNA, 21 nt, synthetic construct
  misc_feature 1..21: note = Synthetic
  source 1..21: mol_type = other RNA
cacctccgtgtgatctacgaa

SEQ ID NO: 2828 - RNA, 21 nt, synthetic construct
  misc_feature 1..21: note = Synthetic
  source 1..21: mol_type = other RNA
cgtgtgatctacgagcgcata

SEQ ID NO: 2829 - RNA, 21 nt, synthetic construct
  misc_feature 1..21: note = Synthetic
  source 1..21: mol_type = other RNA
tgtgatctacgagcgcatgaa

SEQ ID NO: 2830 - RNA, 21 nt, synthetic construct
  misc_feature 1..21: note = Synthetic
  source 1..21: mol_type = other RNA
gagcgcatgaaccagtctcta

SEQ ID NO: 2831 - RNA, 21 nt, synthetic construct
  misc_feature 1..21: note = Synthetic
  source 1..21: mol_type = other RNA
cgcatgaaccagtctctgtca

SEQ ID NO: 2832 - RNA, 21 nt, synthetic construct
  misc_feature 1..21: note = Synthetic
  source 1..21: mol_type = other RNA
gaaggagcagaactactccga

SEQ ID NO: 2833 - RNA, 21 nt, synthetic construct
  misc_feature 1..21: note = Synthetic
  source 1..21: mol_type = other RNA
aaggagcagaactactccgaa

SEQ ID NO: 2834 - RNA, 21 nt, synthetic construct
  misc_feature 1..21: note = Synthetic
  source 1..21: mol_type = other RNA
ggagcagaactactccgacga

SEQ ID NO: 2835 - RNA, 21 nt, synthetic construct
  misc_feature 1..21: note = Synthetic
  source 1..21: mol_type = other RNA
gagcagaactactccgacgaa

SEQ ID NO: 2836 - RNA, 21 nt, synthetic construct
  misc_feature 1..21: note = Synthetic
  source 1..21: mol_type = other RNA
cagaattcggacatgattcaa

SEQ ID NO: 2837 - RNA, 21 nt, synthetic construct
  misc_feature 1..21: note = Synthetic
  source 1..21: mol_type = other RNA
gtccgccatcaaaaactggta

SEQ ID NO: 2838 - RNA, 21 nt, synthetic construct
  misc_feature 1..21: note = Synthetic
  source 1..21: mol_type = other RNA
tccgccatcaaaaactggtga

SEQ ID NO: 2839 - RNA, 21 nt, synthetic construct
  misc_feature 1..21: note = Synthetic
  source 1..21: mol_type = other RNA
catagcaaccgtgattgtcaa

SEQ ID NO: 2840 - RNA, 21 nt, synthetic construct
  misc_feature 1..21: note = Synthetic
  source 1..21: mol_type = other RNA
gcaaccgtgattgtcatcaca

SEQ ID NO: 2841 - RNA, 21 nt, synthetic construct
  misc_feature 1..21: note = Synthetic
  source 1..21: mol_type = other RNA
gaagaaacagtacacatccaa

SEQ ID NO: 2842 - RNA, 21 nt, synthetic construct
  misc_feature 1..21: note = Synthetic
  source 1..21: mol_type = other RNA
gaaacagtacacatccatcca

SEQ ID NO: 2843 - RNA, 21 nt, synthetic construct
  misc_feature 1..21: note = Synthetic
  source 1..21: mol_type = other RNA
gcagcagaacggatatgagaa

SEQ ID NO: 2844 - RNA, 21 nt, synthetic construct
  misc_feature 1..21: note = Synthetic
  source 1..21: mol_type = other RNA
gcagaacggatatgagaatca

SEQ ID NO: 2845 - RNA, 21 nt, synthetic construct
  misc_feature 1..21: note = Synthetic
  source 1..21: mol_type = other RNA
cagaacggatatgagaatcca

SEQ ID NO: 2846 - RNA, 21 nt, synthetic construct
  misc_feature 1..21: note = Synthetic
  source 1..21: mol_type = other RNA
agaacggatatgagaatccaa

SEQ ID NO: 2847 - RNA, 21 nt, synthetic construct
  misc_feature 1..21: note = Synthetic
  source 1..21: mol_type = other RNA
gaacggatatgagaatccaaa

SEQ ID NO: 2848 - RNA, 23 nt, synthetic construct
  misc_feature 1..23: note = Synthetic
  source 1..23: mol_type = other RNA
tgagtttaccacagaacatggcg

SEQ ID NO: 2849 - RNA, 23 nt, synthetic construct
  misc_feature 1..23: note = Synthetic
  source 1..23: mol_type = other RNA
ttgagtttaccacagaacatggc

SEQ ID NO: 2850 - RNA, 23 nt, synthetic construct
  misc_feature 1..23: note = Synthetic
  source 1..23: mol_type = other RNA
tttgagtttaccacagaacatgg

SEQ ID NO: 2851 - RNA, 23 nt, synthetic construct
  misc_feature 1..23: note = Synthetic
  source 1..23: mol_type = other RNA
tgttgagtttaccacagaacatg

SEQ ID NO: 2852 - RNA, 23 nt, synthetic construct
  misc_feature 1..23: note = Synthetic
  source 1..23: mol_type = other RNA
ttgttgagtttaccacagaacat

SEQ ID NO: 2853 - RNA, 23 nt, synthetic construct
  misc_feature 1..23: note = Synthetic
  source 1..23: mol_type = other RNA
tatgttgagtttaccacagaaca

SEQ ID NO: 2854 - RNA, 23 nt, synthetic construct
  misc_feature 1..23: note = Synthetic
  source 1..23: mol_type = other RNA
tcatgttgagtttaccacagaac

SEQ ID NO: 2855 - RNA, 23 nt, synthetic construct
  misc_feature 1..23: note = Synthetic
  source 1..23: mol_type = other RNA
tgcatgttgagtttaccacagaa

SEQ ID NO: 2856 - RNA, 23 nt, synthetic construct
  misc_feature 1..23: note = Synthetic
  source 1..23: mol_type = other RNA
ttgcatgttgagtttaccacaga

SEQ ID NO: 2857 - RNA, 23 nt, synthetic construct
  misc_feature 1..23: note = Synthetic
  source 1..23: mol_type = other RNA
tgtgcatgttgagtttaccacag

SEQ ID NO: 2858 - RNA, 23 nt, synthetic construct
  misc_feature 1..23: note = Synthetic
  source 1..23: mol_type = other RNA
tatgtgcatgttgagtttaccac

SEQ ID NO: 2859 - RNA, 23 nt, synthetic construct
  misc_feature 1..23: note = Synthetic
  source 1..23: mol_type = other RNA
tggtagacctcttggcagtactg

SEQ ID NO: 2860 - RNA, 23 nt, synthetic construct
  misc_feature 1..23: note = Synthetic
  source 1..23: mol_type = other RNA
tgggtagacctcttggcagtact

SEQ ID NO: 2861 - RNA, 23 nt, synthetic construct
  misc_feature 1..23: note = Synthetic
  source 1..23: mol_type = other RNA
tagggtagacctcttggcagtac

SEQ ID NO: 2862 - RNA, 23 nt, synthetic construct
  misc_feature 1..23: note = Synthetic
  source 1..23: mol_type = other RNA
tgtttgtgatctgcagttcaggg

SEQ ID NO: 2863 - RNA, 23 nt, synthetic construct
  misc_feature 1..23: note = Synthetic
  source 1..23: mol_type = other RNA
tacgtttgtgatctgcagttcag

SEQ ID NO: 2864 - RNA, 23 nt, synthetic construct
  misc_feature 1..23: note = Synthetic
  source 1..23: mol_type = other RNA
taaggaatcacgatgtgggtgtg

SEQ ID NO: 2865 - RNA, 23 nt, synthetic construct
  misc_feature 1..23: note = Synthetic
  source 1..23: mol_type = other RNA
tggtaaggaatcacgatgtgggt

SEQ ID NO: 2866 - RNA, 23 nt, synthetic construct
  misc_feature 1..23: note = Synthetic
  source 1..23: mol_type = other RNA
tcggtaaggaatcacgatgtggg

SEQ ID NO: 2867 - RNA, 23 nt, synthetic construct
  misc_feature 1..23: note = Synthetic
  source 1..23: mol_type = other RNA
tccaactaggcaacggtaaggaa

SEQ ID NO: 2868 - RNA, 23 nt, synthetic construct
  misc_feature 1..23: note = Synthetic
  source 1..23: mol_type = other RNA
taccaactaggcaacggtaagga

SEQ ID NO: 2869 - RNA, 23 nt, synthetic construct
  misc_feature 1..23: note = Synthetic
  source 1..23: mol_type = other RNA
taacttgcacttgtcgggcacga

SEQ ID NO: 2870 - RNA, 23 nt, synthetic construct
  misc_feature 1..23: note = Synthetic
  source 1..23: mol_type = other RNA
tgtctcacaaacatccatccgct

SEQ ID NO: 2871 - RNA, 23 nt, synthetic construct
  misc_feature 1..23: note = Synthetic
  source 1..23: mol_type = other RNA
tcatgtctctttggcgacggtgt

SEQ ID NO: 2872 - RNA, 23 nt, synthetic construct
  misc_feature 1..23: note = Synthetic
  source 1..23: mol_type = other RNA
tgttagtgctcttctcgctgcat

SEQ ID NO: 2873 - RNA, 23 nt, synthetic construct
  misc_feature 1..23: note = Synthetic
  source 1..23: mol_type = other RNA
tagttagtgctcttctcgctgca

SEQ ID NO: 2874 - RNA, 23 nt, synthetic construct
  misc_feature 1..23: note = Synthetic
  source 1..23: mol_type = other RNA
tcgtgcaagttagtgctcttctc

SEQ ID NO: 2875 - RNA, 23 nt, synthetic construct
  misc_feature 1..23: note = Synthetic
  source 1..23: mol_type = other RNA
ttcgtgcaagttagtgctcttct

SEQ ID NO: 2876 - RNA, 23 nt, synthetic construct
  misc_feature 1..23: note = Synthetic
  source 1..23: mol_type = other RNA
tgtcgtgcaagttagtgctcttc

SEQ ID NO: 2877 - RNA, 23 nt, synthetic construct
  misc_feature 1..23: note = Synthetic
  source 1..23: mol_type = other RNA
ttagtcgtgcaagttagtgctct

SEQ ID NO: 2878 - RNA, 23 nt, synthetic construct
  misc_feature 1..23: note = Synthetic
  source 1..23: mol_type = other RNA
tatagtcgtgcaagttagtgctc

SEQ ID NO: 2879 - RNA, 23 nt, synthetic construct
  misc_feature 1..23: note = Synthetic
  source 1..23: mol_type = other RNA
tcatagtcgtgcaagttagtgct

SEQ ID NO: 2880 - RNA, 23 nt, synthetic construct
  misc_feature 1..23: note = Synthetic
  source 1..23: mol_type = other RNA
tccatagtcgtgcaagttagtgc

SEQ ID NO: 2881 - RNA, 23 nt, synthetic construct
  misc_feature 1..23: note = Synthetic
  source 1..23: mol_type = other RNA
tagcatgccatagtcgtgcaagt

SEQ ID NO: 2882 - RNA, 23 nt, synthetic construct
  misc_feature 1..23: note = Synthetic
  source 1..23: mol_type = other RNA
ttgacatcaaagtaccagcggga

SEQ ID NO: 2883 - RNA, 23 nt, synthetic construct
  misc_feature 1..23: note = Synthetic
  source 1..23: mol_type = other RNA
tttcagtgacatcaaagtaccag

SEQ ID NO: 2884 - RNA, 23 nt, synthetic construct
  misc_feature 1..23: note = Synthetic
  source 1..23: mol_type = other RNA
tcgtaaaagaatgggacacactt

SEQ ID NO: 2885 - RNA, 23 nt, synthetic construct
  misc_feature 1..23: note = Synthetic
  source 1..23: mol_type = other RNA
tccgtaaaagaatgggacacact

SEQ ID NO: 2886 - RNA, 23 nt, synthetic construct
  misc_feature 1..23: note = Synthetic
  source 1..23: mol_type = other RNA
tgccgtaaaagaatgggacacac

SEQ ID NO: 2887 - RNA, 23 nt, synthetic construct
  misc_feature 1..23: note = Synthetic
  source 1..23: mol_type = other RNA
tcgccgtaaaagaatgggacaca

SEQ ID NO: 2888 - RNA, 23 nt, synthetic construct
  misc_feature 1..23: note = Synthetic
  source 1..23: mol_type = other RNA
tccgccgtaaaagaatgggacac

SEQ ID NO: 2889 - RNA, 23 nt, synthetic construct
  misc_feature 1..23: note = Synthetic
  source 1..23: mol_type = other RNA
tatgcagtactcttccgtgtcaa

SEQ ID NO: 2890 - RNA, 23 nt, synthetic construct
  misc_feature 1..23: note = Synthetic
  source 1..23: mol_type = other RNA
taaactttgggttgacacgctgc

SEQ ID NO: 2891 - RNA, 23 nt, synthetic construct
  misc_feature 1..23: note = Synthetic
  source 1..23: mol_type = other RNA
tagtaaactttgggttgacacgc

SEQ ID NO: 2892 - RNA, 23 nt, synthetic construct
  misc_feature 1..23: note = Synthetic
  source 1..23: mol_type = other RNA
tgagtaaactttgggttgacacg

SEQ ID NO: 2893 - RNA, 23 nt, synthetic construct
  misc_feature 1..23: note = Synthetic
  source 1..23: mol_type = other RNA
tagtcttgagtaaactttgggtt

SEQ ID NO: 2894 - RNA, 23 nt, synthetic construct
  misc_feature 1..23: note = Synthetic
  source 1..23: mol_type = other RNA
ttagtcttgagtaaactttgggt

SEQ ID NO: 2895 - RNA, 23 nt, synthetic construct
  misc_feature 1..23: note = Synthetic
  source 1..23: mol_type = other RNA
tggtagtcttgagtaaactttgg

SEQ ID NO: 2896 - RNA, 23 nt, synthetic construct
  misc_feature 1..23: note = Synthetic
  source 1..23: mol_type = other RNA
tggttcactggtagtcttgagta

SEQ ID NO: 2897 - RNA, 23 nt, synthetic construct
  misc_feature 1..23: note = Synthetic
  source 1..23: mol_type = other RNA
tgaagaggttcactggtagtctt

SEQ ID NO: 2898 - RNA, 23 nt, synthetic construct
  misc_feature 1..23: note = Synthetic
  source 1..23: mol_type = other RNA
tgggaagtttatcaggatcttgg

SEQ ID NO: 2899 - RNA, 23 nt, synthetic construct
  misc_feature 1..23: note = Synthetic
  source 1..23: mol_type = other RNA
ttgggaagtttatcaggatcttg

SEQ ID NO: 2900 - RNA, 23 nt, synthetic construct
  misc_feature 1..23: note = Synthetic
  source 1..23: mol_type = other RNA
tcgtgggaagtttatcaggatct

SEQ ID NO: 2901 - RNA, 23 nt, synthetic construct
  misc_feature 1..23: note = Synthetic
  source 1..23: mol_type = other RNA
ttcgtgggaagtttatcaggatc

SEQ ID NO: 2902 - RNA, 23 nt, synthetic construct
  misc_feature 1..23: note = Synthetic
  source 1..23: mol_type = other RNA
tgtcgtgggaagtttatcaggat

SEQ ID NO: 2903 - RNA, 23 nt, synthetic construct
  misc_feature 1..23: note = Synthetic
  source 1..23: mol_type = other RNA
ttgggacattctctctcggtgct

SEQ ID NO: 2904 - RNA, 23 nt, synthetic construct
  misc_feature 1..23: note = Synthetic
  source 1..23: mol_type = other RNA
tcattctctcatgacctgggaca

SEQ ID NO: 2905 - RNA, 23 nt, synthetic construct
  misc_feature 1..23: note = Synthetic
  source 1..23: mol_type = other RNA
taacggccttcttgtcagctttg

SEQ ID NO: 2906 - RNA, 23 nt, synthetic construct
  misc_feature 1..23: note = Synthetic
  source 1..23: mol_type = other RNA
tggataacggccttcttgtcagc

SEQ ID NO: 2907 - RNA, 23 nt, synthetic construct
  misc_feature 1..23: note = Synthetic
  source 1..23: mol_type = other RNA
ttgatgtaattctcgagggccag

SEQ ID NO: 2908 - RNA, 23 nt, synthetic construct
  misc_feature 1..23: note = Synthetic
  source 1..23: mol_type = other RNA
tgaacacatgatgaggccttggg

SEQ ID NO: 2909 - RNA, 23 nt, synthetic construct
  misc_feature 1..23: note = Synthetic
  source 1..23: mol_type = other RNA
tagcatgttgaacacatgatgag

SEQ ID NO: 2910 - RNA, 23 nt, synthetic construct
  misc_feature 1..23: note = Synthetic
  source 1..23: mol_type = other RNA
tacgtacttcttcagcatgttga

SEQ ID NO: 2911 - RNA, 23 nt, synthetic construct
  misc_feature 1..23: note = Synthetic
  source 1..23: mol_type = other RNA
tggacgtacttcttcagcatgtt

SEQ ID NO: 2912 - RNA, 23 nt, synthetic construct
  misc_feature 1..23: note = Synthetic
  source 1..23: mol_type = other RNA
tcggacgtacttcttcagcatgt

SEQ ID NO: 2913 - RNA, 23 nt, synthetic construct
  misc_feature 1..23: note = Synthetic
  source 1..23: mol_type = other RNA
tacggacgtacttcttcagcatg

SEQ ID NO: 2914 - RNA, 23 nt, synthetic construct
  misc_feature 1..23: note = Synthetic
  source 1..23: mol_type = other RNA
tcacggacgtacttcttcagcat

SEQ ID NO: 2915 - RNA, 23 nt, synthetic construct
  misc_feature 1..23: note = Synthetic
  source 1..23: mol_type = other RNA
tgcacggacgtacttcttcagca

SEQ ID NO: 2916 - RNA, 23 nt, synthetic construct
  misc_feature 1..23: note = Synthetic
  source 1..23: mol_type = other RNA
taaaatgctttagggtgtgctgt

SEQ ID NO: 2917 - RNA, 23 nt, synthetic construct
  misc_feature 1..23: note = Synthetic
  source 1..23: mol_type = other RNA
tcgcacatgttcaaaatgcttta

SEQ ID NO: 2918 - RNA, 23 nt, synthetic construct
  misc_feature 1..23: note = Synthetic
  source 1..23: mol_type = other RNA
tgcgcacatgttcaaaatgcttt

SEQ ID NO: 2919 - RNA, 23 nt, synthetic construct
  misc_feature 1..23: note = Synthetic
  source 1..23: mol_type = other RNA
ttcgtagatcacacggaggtgtg

SEQ ID NO: 2920 - RNA, 23 nt, synthetic construct
  misc_feature 1..23: note = Synthetic
  source 1..23: mol_type = other RNA
tatgcgctcgtagatcacacgga

SEQ ID NO: 2921 - RNA, 23 nt, synthetic construct
  misc_feature 1..23: note = Synthetic
  source 1..23: mol_type = other RNA
ttcatgcgctcgtagatcacacg

SEQ ID NO: 2922 - RNA, 23 nt, synthetic construct
  misc_feature 1..23: note = Synthetic
  source 1..23: mol_type = other RNA
tagagactggttcatgcgctcgt

SEQ ID NO: 2923 - RNA, 23 nt, synthetic construct
  misc_feature 1..23: note = Synthetic
  source 1..23: mol_type = other RNA
tgacagagactggttcatgcgct

SEQ ID NO: 2924 - RNA, 23 nt, synthetic construct
  misc_feature 1..23: note = Synthetic
  source 1..23: mol_type = other RNA
tcggagtagttctgctccttctg

SEQ ID NO: 2925 - RNA, 23 nt, synthetic construct
  misc_feature 1..23: note = Synthetic
  source 1..23: mol_type = other RNA
ttcggagtagttctgctccttct

SEQ ID NO: 2926 - RNA, 23 nt, synthetic construct
  misc_feature 1..23: note = Synthetic
  source 1..23: mol_type = other RNA
tcgtcggagtagttctgctcctt

SEQ ID NO: 2927 - RNA, 23 nt, synthetic construct
  misc_feature 1..23: note = Synthetic
  source 1..23: mol_type = other RNA
ttcgtcggagtagttctgctcct

SEQ ID NO: 2928 - RNA, 23 nt, synthetic construct
  misc_feature 1..23: note = Synthetic
  source 1..23: mol_type = other RNA
ttgaatcatgtccgaattctgca

SEQ ID NO: 2929 - RNA, 23 nt, synthetic construct
  misc_feature 1..23: note = Synthetic
  source 1..23: mol_type = other RNA
taccagtttttgatggcggactt

SEQ ID NO: 2930 - RNA, 23 nt, synthetic construct
  misc_feature 1..23: note = Synthetic
  source 1..23: mol_type = other RNA
tcaccagtttttgatggcggact

SEQ ID NO: 2931 - RNA, 23 nt, synthetic construct
  misc_feature 1..23: note = Synthetic
  source 1..23: mol_type = other RNA
ttgacaatcacggttgctatgac

SEQ ID NO: 2932 - RNA, 23 nt, synthetic construct
  misc_feature 1..23: note = Synthetic
  source 1..23: mol_type = other RNA
tgtgatgacaatcacggttgcta

SEQ ID NO: 2933 - RNA, 23 nt, synthetic construct
  misc_feature 1..23: note = Synthetic
  source 1..23: mol_type = other RNA
ttggatgtgtactgtttcttctt

SEQ ID NO: 2934 - RNA, 23 nt, synthetic construct
  misc_feature 1..23: note = Synthetic
  source 1..23: mol_type = other RNA
tggatggatgtgtactgtttctt

SEQ ID NO: 2935 - RNA, 23 nt, synthetic construct
  misc_feature 1..23: note = Synthetic
  source 1..23: mol_type = other RNA
ttctcatatccgttctgctgcat

SEQ ID NO: 2936 - RNA, 23 nt, synthetic construct
  misc_feature 1..23: note = Synthetic
  source 1..23: mol_type = other RNA
tgattctcatatccgttctgctg

SEQ ID NO: 2937 - RNA, 23 nt, synthetic construct
  misc_feature 1..23: note = Synthetic
  source 1..23: mol_type = other RNA
tggattctcatatccgttctgct

SEQ ID NO: 2938 - RNA, 23 nt, synthetic construct
  misc_feature 1..23: note = Synthetic
  source 1..23: mol_type = other RNA
ttggattctcatatccgttctgc

SEQ ID NO: 2939 - RNA, 23 nt, synthetic construct
  misc_feature 1..23: note = Synthetic
  source 1..23: mol_type = other RNA
tttggattctcatatccgttctg

SEQ ID NO: 2940 - DNA, 2680 bp, Macaca fascicularis
  source 1..2680: mol_type = other DNA
aaacaaaacagcggctggtctggaaggaacctgaactgcgagcggcggcagcaacggcggcggcggctaagcacctaatctgggagcctgcaagtgacaacagcctttgaggtccttagacagcttggcctggaggagaacacatgaaagaaagaacctcaagaggctttgttttctgtgaaacagtatttctatacagttgctccaatgacagagttacctgcaccgttgtcctacttccagaatgcacagatgtccgaggacaaccacttgagcaatactgtacgtagccagaatgacaatagagaacggcaggagcacaacgacaggcggagccttggccaccctgagccattatctaatggacgaccccagggtaactctcggcaggtggtggagcaagatgaagaagaagatgaggagctgacattgaaatatggcgccaaacatgtgatcatgctctttgtccccgtgactctctgcatggtggtggtcgtggctaccatcaagtcagtcagcttttatacccggaaggatgggcagctaatctataccccattcacagaagataccgagactgtgggccagagagccctgcactcaattctgaatgcggccatcatgatcagtgtcattgttgtcatgactatcctcctggtggttctgtataaatacaggtgctataaggtcatccatgcctggcttattatatcatctctattgttgctgttctttttttcattcaaaaacttgggggaagtgtttaaaacctataacgttgctgtggactacattactgttgcactcctgatctggaattttggtgtggtgggaatgatttccattcactggaaaggtccacttcgactccagcaggcatatctcattatgattagtgccctcatggccctggtgtttatcaagtacctccctgaatggactgcgtggctcatcttggctgtgatttcagtatatgatttagtggctgttttgtgtccgaaaggtccacttcgtatgctggttgagacagctcaggagagaaatgaaacactttttccagctctcatttactcctcaacaatggtttggttggtgaatatggcagaaggagacccggaagctcaaaggagagtatccaaaaattccaagtataatgcagaaagcacagaaagggagtcacaagacacggttgcagagaatgatgatggcggcttcagtgaggaatgggaagcccagagggacagtcatctagggcctcatcgctctacacctgagtcacgagctgctgtccaggaactttccagcagcatccttgctggtgaagatccagaagaaaggggagtaaaacttggattgggagatttcattttctacagtgttctggttggtaaagcctcagcaacagccagtggagactggaacacaaccatagcctgttttgtagccatattaattggtttgtgccttacattattactcctcgccattttcaagaaagcattgccagctcttccaatctccatcacctttgggcttgttttctactctgccacagattatcttgtacagccttttatggaccaattagcattccatcaattttatatctagcatatttgccgttagaatcccatggatgtttctcctttgactataacaaaatctggggaggacaaaggtgattttcctgtgtccacatctaacaaagtcaagattcctggctggacttctacagcttccttccaagtcttcctgaccacctgcactattggactttggaaggaggtgcctatagaaaacgattttgaacatacttcatcgcagtggactatgtccctcggtgcagaaactaccagatttgagggacgaggtcaaggagacatgatgggcccggaagttgctgtgccccatcagcagcttgatgcttggtcacaggatgatttcgccgacactgcggactctcaggactaccgttaccaagaggttaggtgaagtggtttaaaccaaacggaactcttcatcttaaactacacgttgaaaatcatcccaataattctgtattataactgaattctgaacttttcaggaggtactgtgaggaagagcaggcaccagcagcagaatggagaggtgggcaggggctccagcttccctttgattttttgctgcagactcatcctttttaaatgagacttgttttcccccgtctttgagtcaggtcaaatgtgtagattgactttggcaattcttctcaagcactgacactcattaccatctgtgattgtcatttcttcccaaggccagtctgaacgtgaggttgctttatcctaaaacttttaacctcaggttccaaattcagtaaattttggaaataatacaactatttctcatcaattctctatcatcttgaagtcaaatttggattttccaccaaattctgaatttgtagacatacttgtaggctcacttgccccagatgcctcctctgtcctcattcttctctcacccccacacaagccgtccttttctacagtcagtaaggcagctctgtcgtggtagcagatggtcccattattctagggttttactctttgtatgatgaaaagaatgtgttatgaattggtgctgtcagccctgctgtcagaccttcttccacagcaaatgagatgtatgcccaaag

SEQ ID NO: 2941 - DNA, 2680 bp, synthetic construct
  misc_feature 1..2680: note = Synthetic
  source 1..2680: mol_type = other DNA
ctttgggcatacatctcatttgctgtggaagaaggtctgacagcagggctgacagcaccaattcataacacattcttttcatcatacaaagagtaaaaccctagaataatgggaccatctgctaccacgacagagctgccttactgactgtagaaaaggacggcttgtgtgggggtgagagaagaatgaggacagaggaggcatctggggcaagtgagcctacaagtatgtctacaaattcagaatttggtggaaaatccaaatttgacttcaagatgatagagaattgatgagaaatagttgtattatttccaaaatttactgaatttggaacctgaggttaaaagttttaggataaagcaacctcacgttcagactggccttgggaagaaatgacaatcacagatggtaatgagtgtcagtgcttgagaagaattgccaaagtcaatctacacatttgacctgactcaaagacgggggaaaacaagtctcatttaaaaaggatgagtctgcagcaaaaaatcaaagggaagctggagcccctgcccacctctccattctgctgctggtgcctgctcttcctcacagtacctcctgaaaagttcagaattcagttataatacagaattattgggatgattttcaacgtgtagtttaagatgaagagttccgtttggtttaaaccacttcacctaacctcttggtaacggtagtcctgagagtccgcagtgtcggcgaaatcatcctgtgaccaagcatcaagctgctgatggggcacagcaacttccgggcccatcatgtctccttgacctcgtccctcaaatctggtagtttctgcaccgagggacatagtccactgcgatgaagtatgttcaaaatcgttttctataggcacctccttccaaagtccaatagtgcaggtggtcaggaagacttggaaggaagctgtagaagtccagccaggaatcttgactttgttagatgtggacacaggaaaatcacctttgtcctccccagattttgttatagtcaaaggagaaacatccatgggattctaacggcaaatatgctagatataaaattgatggaatgctaattggtccataaaaggctgtacaagataatctgtggcagagtagaaaacaagcccaaaggtgatggagattggaagagctggcaatgctttcttgaaaatggcgaggagtaataatgtaaggcacaaaccaattaatatggctacaaaacaggctatggttgtgttccagtctccactggctgttgctgaggctttaccaaccagaacactgtagaaaatgaaatctcccaatccaagttttactcccctttcttctggatcttcaccagcaaggatgctgctggaaagttcctggacagcagctcgtgactcaggtgtagagcgatgaggccctagatgactgtccctctgggcttcccattcctcactgaagccgccatcatcattctctgcaaccgtgtcttgtgactccctttctgtgctttctgcattatacttggaatttttggatactctcctttgagcttccgggtctccttctgccatattcaccaaccaaaccattgttgaggagtaaatgagagctggaaaaagtgtttcatttctctcctgagctgtctcaaccagcatacgaagtggacctttcggacacaaaacagccactaaatcatatactgaaatcacagccaagatgagccacgcagtccattcagggaggtacttgataaacaccagggccatgagggcactaatcataatgagatatgcctgctggagtcgaagtggacctttccagtgaatggaaatcattcccaccacaccaaaattccagatcaggagtgcaacagtaatgtagtccacagcaacgttataggttttaaacacttcccccaagtttttgaatgaaaaaaagaacagcaacaatagagatgatataataagccaggcatggatgaccttatagcacctgtatttatacagaaccaccaggaggatagtcatgacaacaatgacactgatcatgatggccgcattcagaattgagtgcagggctctctggcccacagtctcggtatcttctgtgaatggggtatagattagctgcccatccttccgggtataaaagctgactgacttgatggtagccacgaccaccaccatgcagagagtcacggggacaaagagcatgatcacatgtttggcgccatatttcaatgtcagctcctcatcttcttcttcatcttgctccaccacctgccgagagttaccctggggtcgtccattagataatggctcagggtggccaaggctccgcctgtcgttgtgctcctgccgttctctattgtcattctggctacgtacagtattgctcaagtggttgtcctcggacatctgtgcattctggaagtaggacaacggtgcaggtaactctgtcattggagcaactgtatagaaatactgtttcacagaaaacaaagcctcttgaggttctttctttcatgtgttctcctccaggccaagctgtctaaggacctcaaaggctgttgtcacttgcaggctcccagattaggtgcttagccgccgccgccgttgctgccgccgctcgcagttcaggttccttccagaccagccgctgttttgttt

SEQ ID NO: 2942 - protein, 467 aa, Macaca fascicularis
MTELPAPLSYFQNAQMSEDNHLSNTVRSQNDNRERQEHNDRRSLGHPEPLSNGRPQGNSRQVVEQDEEEDEELTLKYGAKHVIMLFVPVTLCMVVVVATIKSVSFYTRKDGQLIYTPFTEDTETVGQRALHSILNAAIMISVIVVMTILLVVLYKYRCYKVIHAWLIISSLLLLFFFSFKNLGEVFKTYNVAVDYITVALLIWNFGVVGMISIHWKGPLRLQQAYLIMISALMALVFIKYLPEWTAWLILAVISVYDLVAVLCPKGPLRMLVETAQERNETLFPALIYSSTMVWLVNMAEGDPEAQRRVSKNSKYNAESTERESQDTVAENDDGGFSEEWEAQRDSHLGPHRSTPESRAAVQELSSSILAGEDPEERGVKLGLGDFIFYSVLVGKASATASGDWNTTIACFVAILIGLCLTLLLLAIFKKALPALPISITFGLVFYSATDYLVQPFMDQLAFHQFYI

SEQ ID NO: 2943 - DNA, 1410 bp, Mus musculus
  source 1..1410: mol_type = other DNA
atgacagagatacctgcacctttgacctacttccagaatgcccagatgtctgaggacagccactccagcagcgccatccggagccagaatgacagccaagaacggcagcagcagcatgagaggcagagacttgacaaccctgagccaatatctaatgggcggccccagagtaactcaagacaggtggtggaacaagattgtatggaggaagacgaagagctgacattgaaatatggagccaagcatgtcatcatgctctttgtccccgtgaccctctgcatggtcgtcgtcgtggccaccatcaaatcagtcagcttctatacccggaaggacggtcagctaatctacaccccattcacagaagacactgagactgtaggccaaagagccctgcactcgatcctgaatgcggccatcatgatcagtgtcattgtcattatgaccatcctcctggtggtcctgtataaatacaggtgctacaaggtcatccatgcctggcttattatttcatctctgttgttgctgttctttttttcgttcatttacctaggggaagtatttaagacctacaatgtcgccgtggactacttaacagtagcactcctaatctggaattttggtgtggtcgggatgattgccatccactggaaaggcccccttcgactgcagcaggcgtatctcattatgatcagtgccctcatggccctggtatttatcaagtacctccccgaatggaccgcatggctcatcttggctgtgatttcagtatatgatttggtggctgttttatgtcccaaaggcccacttcgtatgctggttgaaacagctcaggaaagaaatgagactctctttccagctcttatctattcctcaacaatggtgtggttggtgaatatggctgaaggagacccagaagcccaaaggagggtacccaaaaaccccaagtataacacacaaagagccaggagagacgagacacaggacagtggttctgggaacgatgatggtggcttcagtgaggagtgggaggcccaaagagacagtcacctggggcctcatcgctccactcccgagtcaagagctgctgtccaggaactttctgggagcattctaacgagtgaagacccggaggaaagaggagtaaaacttggactgggagatttcattttctacagtgttctggttggtaaggcctcagcaaccgcaagtggagactggaacacaaccatagcctgctttgtagccatactgatcggcctgtgccttacattactcctgctcgccattttcaagaaagcgttgccagccctccccatctccatcactttcggcctcgtgttctacttcgccacggattaccttgtgcagcccttcatggaccaacttgcattccatcagttttatatctag

SEQ ID NO: 2944 - DNA, 1410 bp, synthetic construct
  misc_feature 1..1410: note = Synthetic
  source 1..1410: mol_type = other DNA
ctagatataaaactgatggaatgcaagttggtccatgaagggctgcacaaggtaatccgtggcgaagtagaacacgaggccgaaagtgatggagatggggagggctggcaacgctttcttgaaaatggcgagcaggagtaatgtaaggcacaggccgatcagtatggctacaaagcaggctatggttgtgttccagtctccacttgcggttgctgaggccttaccaaccagaacactgtagaaaatgaaatctcccagtccaagttttactcctctttcctccgggtcttcactcgttagaatgctcccagaaagttcctggacagcagctcttgactcgggagtggagcgatgaggccccaggtgactgtctctttgggcctcccactcctcactgaagccaccatcatcgttcccagaaccactgtcctgtgtctcgtctctcctggctctttgtgtgttatacttggggtttttgggtaccctcctttgggcttctgggtctccttcagccatattcaccaaccacaccattgttgaggaatagataagagctggaaagagagtctcatttctttcctgagctgtttcaaccagcatacgaagtgggcctttgggacataaaacagccaccaaatcatatactgaaatcacagccaagatgagccatgcggtccattcggggaggtacttgataaataccagggccatgagggcactgatcataatgagatacgcctgctgcagtcgaagggggcctttccagtggatggcaatcatcccgaccacaccaaaattccagattaggagtgctactgttaagtagtccacggcgacattgtaggtcttaaatacttcccctaggtaaatgaacgaaaaaaagaacagcaacaacagagatgaaataataagccaggcatggatgaccttgtagcacctgtatttatacaggaccaccaggaggatggtcataatgacaatgacactgatcatgatggccgcattcaggatcgagtgcagggctctttggcctacagtctcagtgtcttctgtgaatggggtgtagattagctgaccgtccttccgggtatagaagctgactgatttgatggtggccacgacgacgaccatgcagagggtcacggggacaaagagcatgatgacatgcttggctccatatttcaatgtcagctcttcgtcttcctccatacaatcttgttccaccacctgtcttgagttactctggggccgcccattagatattggctcagggttgtcaagtctctgcctctcatgctgctgctgccgttcttggctgtcattctggctccggatggcgctgctggagtggctgtcctcagacatctgggcattctggaagtaggtcaaaggtgcaggtatctctgtcat

SEQ ID NO: 2945 - protein, 469 aa, Mus musculus
MTEIPAPLTYFQNAQMSEDSHSSSAIRSQNDSQERQQQHERQRLDNPEPISNGRPQSNSRQVVEQDCMEEDEELTLKYGAKHVIMLFVPVTLCMVVVVATIKSVSFYTRKDGQLIYTPFTEDTETVGQRALHSILNAAIMISVIVIMTILLVVLYKYRCYKVIHAWLIISSLLLLFFFSFIYLGEVFKTYNVAVDYLTVALLIWNFGVVGMIAIHWKGPLRLQQAYLIMISALMALVFIKYLPEWTAWLILAVISVYDLVAVLCPKGPLRMLVETAQERNETLFPALIYSSTMVWLVNMAEGDPEAQRRVPKNPKYNTQRARRDETQDSGSGNDDGGFSEEWEAQRDSHLGPHRSTPESRAAVQELSGSILTSEDPEERGVKLGLGDFIFYSVLVGKASATASGDWNTTIACFVAILIGLCLTLLLLAIFKKALPALPISITFGLVFYFATDYLVQPFMDQLAFHQFYI

SEQ ID NO: 2946 - DNA, 1407 bp, Rattus norvegicus
  source 1..1407: mol_type = other DNA
atgacagagatacctgcacctttgtcctacttccagaatgcacagatgtctgaggacagccactccagcagcgtccgtagccagaatgacaatcaagaacggcagcagcatcatgacagacagagacttgacaaccctgagtcgatatctaatggccgaccccagagtaactttaccaggcaggtgatagagcaagatgaggaggaagacgaagagctgacattgaaatatggagccaagcacgtcatcatgctctttgttcctgtgaccctctgcatggtcgttgtggtggccactatcaagtcagtcagcttctacacccggaaggatgggcagctaatctataccccattcacagaagacaccgagactgtaggccagagagccctgcactcgatcttgaatgccgccatcatgatcagtgtcatcgtcgttatgaccatcctcctggtggtcctgtataagtacaggtgctacaaggtcatccatgcctggcttattgtttcatctctgttgttgctgttctttttttcattcatttacttaggggaagtattcaagacctacaatgtcgccgtggactatattacggttgcactcctgatctggaattttggtgtggtcgggatgattgccattcactggaaaggcccactccgactgcagcaggcgtatctcattatgatcagtgccctcatgtccctggtatttatcaagtacctccctgaatggaccgcatggctcatcttggctgtgatttcagtatatgatttggtggctgttctgtgccccaaaggtccacttcgtatgctggtcgaaacagctcaggaaagaaatgagactctctttccagctcttatctattcctcaaccatggtgtggttggtgaatatggctgaaggagacccagaagcccaaaggagggtacccaaaaaccccaagtatagcacacaaggaacagagagggaagagacacaggacactggcactgggagcgatgatggtggcttcagtgaggagtgggaggcccaaagagacagtcacctggggcctcatcgctccactcctgagtcaagagctgctgtccaggaactttctgggagcatcctcactagtgaagacccggaggaaagaggagtaaggcttgggctgggagatttcattttctacagtgttctggttggtaaggcctcagcgaccgccagtggggactggaacacaaccatagcctgctttgtagccatattgatcggcctgtgccttacgttactcctgctcgccattttcaagaaagcgttgccggcccttcccatctccatcaccttcgggctcattttctactttgccacggattatctcgtgcagcccttcatggaccaacttgcattccatcaattttatatctag

SEQ ID NO: 2947 - DNA, 1407 bp, synthetic construct
  misc_feature 1..1407: note = Synthetic
  source 1..1407: mol_type = other DNA
ctagatataaaattgatggaatgcaagttggtccatgaagggctgcacgagataatccgtggcaaagtagaaaatgagcccgaaggtgatggagatgggaagggccggcaacgctttcttgaaaatggcgagcaggagtaacgtaaggcacaggccgatcaatatggctacaaagcaggctatggttgtgttccagtccccactggcggtcgctgaggccttaccaaccagaacactgtagaaaatgaaatctcccagcccaagccttactcctctttcctccgggtcttcactagtgaggatgctcccagaaagttcctggacagcagctcttgactcaggagtggagcgatgaggccccaggtgactgtctctttgggcctcccactcctcactgaagccaccatcatcgctcccagtgccagtgtcctgtgtctcttccctctctgttccttgtgtgctatacttggggtttttgggtaccctcctttgggcttctgggtctccttcagccatattcaccaaccacaccatggttgaggaatagataagagctggaaagagagtctcatttctttcctgagctgtttcgaccagcatacgaagtggacctttggggcacagaacagccaccaaatcatatactgaaatcacagccaagatgagccatgcggtccattcagggaggtacttgataaataccagggacatgagggcactgatcataatgagatacgcctgctgcagtcggagtgggcctttccagtgaatggcaatcatcccgaccacaccaaaattccagatcaggagtgcaaccgtaatatagtccacggcgacattgtaggtcttgaatacttcccctaagtaaatgaatgaaaaaaagaacagcaacaacagagatgaaacaataagccaggcatggatgaccttgtagcacctgtacttatacaggaccaccaggaggatggtcataacgacgatgacactgatcatgatggcggcattcaagatcgagtgcagggctctctggcctacagtctcggtgtcttctgtgaatggggtatagattagctgcccatccttccgggtgtagaagctgactgacttgatagtggccaccacaacgaccatgcagagggtcacaggaacaaagagcatgatgacgtgcttggctccatatttcaatgtcagctcttcgtcttcctcctcatcttgctctatcacctgcctggtaaagttactctggggtcggccattagatatcgactcagggttgtcaagtctctgtctgtcatgatgctgctgccgttcttgattgtcattctggctacggacgctgctggagtggctgtcctcagacatctgtgcattctggaagtaggacaaaggtgcaggtatctctgtcat

SEQ ID NO: 2948 - protein, 468 aa, Rattus norvegicus
MTEIPAPLSYFQNAQMSEDSHSSSVRSQNDNQERQQHHDRQRLDNPESISNGRPQSNFTRQVIEQDEEEDEELTLKYGAKHVIMLFVPVTLCMVVVVATIKSVSFYTRKDGQLIYTPFTEDTETVGQRALHSILNAAIMISVIVVMTILLVVLYKYRCYKVIHAWLIVSSLLLLFFFSFIYLGEVFKTYNVAVDYITVALLIWNFGVVGMIAIHWKGPLRLQQAYLIMISALMSLVFIKYLPEWTAWLILAVISVYDLVAVLCPKGPLRMLVETAQERNETLFPALIYSSTMVWLVNMAEGDPEAQRRVPKNPKYSTQGTEREETQDTGTGSDDGGFSEEWEAQRDSHLGPHRSTPESRAAVQELSGSILTSEDPEERGVRLGLGDFIFYSVLVGKASATASGDWNTTIACFVAILIGLCLTLLLLAIFKKALPALPISITFGLIFYFATDYLVQPFMDQLAFHQFYI

SEQ ID NO: 2949 - RNA, 21 nt, synthetic construct
  misc_feature 1..21: note = Synthetic
  source 1..21: mol_type = other RNA
gggagtcaaagttctgtttga

SEQ ID NO: 2950 - RNA, 23 nt, synthetic construct
  misc_feature 1..23: note = Synthetic
  source 1..23: mol_type = other RNA
tcaaacagaactttgactcccat

SEQ ID NO: 2951 - RNA, 21 nt, synthetic construct
  misc_feature 1..21: note = Synthetic
  source 1..21: mol_type = other RNA
gggagtcaaagttctgtttga

SEQ ID NO: 2952 - RNA, 23 nt, synthetic construct
  misc_feature 1..23: note = Synthetic
  source 1..23: mol_type = other RNA
tcaaacagaactttgactcccat
